United States Patent Application Publication US 2022/0211063 A1 - sequence listing, part 40

SEQ ID NO: 106 - DNA, 2508889 bp, Penicillium roqueforti (residues 1,254,446-2,508,889 of 2,508,889)
  misc_feature (1216)..(6722): n is a, c, g, or t
  misc_feature (98486)..(98857): n is a, c, g, or t
  misc_feature (139994)..(140089): n is a, c, g, or t
  misc_feature (294325)..(294500): n is a, c, g, or t
  misc_feature (357354)..(357539): n is a, c, g, or t
  misc_feature (460933)..(461009): n is a, c, g, or t
  misc_feature (472525)..(472706): n is a, c, g, or t
  misc_feature (615690)..(615971): n is a, c, g, or t
  misc_feature (740360)..(740468): n is a, c, g, or t
  misc_feature (916261)..(916397): n is a, c, g, or t
  misc_feature (1075413)..(1075558): n is a, c, g, or t
  misc_feature (1089885)..(1208385): n is a, c, g, or t
  misc_feature (1219975)..(1220016): n is a, c, g, or t
  misc_feature (1222376)..(1222549): n is a, c, g, or t
  misc_feature (1322066)..(1322136): n is a, c, g, or t
  misc_feature (1378218)..(1378590): n is a, c, g, or t
  misc_feature (1383261)..(1383620): n is a, c, g, or t
  misc_feature (1417302)..(1417562): n is a, c, g, or t
  misc_feature (1457284)..(1457478): n is a, c, g, or t
  misc_feature (1553470)..(1553540): n is a, c, g, or t
  misc_feature (1556372)..(1556476): n is a, c, g, or t
  misc_feature (1568073)..(1568168): n is a, c, g, or t
  misc_feature (1711202)..(1716944): n is a, c, g, or t
  misc_feature (1761859)..(1762000): n is a, c, g, or t
  misc_feature (1945736)..(1945833): n is a, c, g, or t
  misc_feature (1956336)..(1956458): n is a, c, g, or t
  misc_feature (2133054)..(2133157): n is a, c, g, or t
  misc_feature (2256405)..(2256563): n is a, c, g, or t
  misc_feature (2267731)..(2267762): n is a, c, g, or t
  misc_feature (2288074)..(2288242): n is a, c, g, or t
  misc_feature (2341475)..(2341493): n is a, c, g, or t
  misc_feature (2431100)..(2431445): n is a, c, g, or t
  misc_feature (2438809)..(2439259): n is a, c, g, or t
  misc_feature (2445091)..(2445235): n is a, c, g, or t
  misc_feature (2482527)..(2482735): n is a, c, g, or t
  misc_feature (2508883)..(2508884): n is a, c, g, or t
  misc_feature (2508886)..(2508887): n is a, c, g, or t
ttgcgatttcaatcgcggtggtgcaccatctttccactccggctcggcgagtccaggccgtcgccgagatcatgcgaactgtgaaacatggttcagagatgcaggagggcgggaaagtcctgatctacgcctgggccctcgagcaaaagaacagccgtagaggttgggacaagggcgacgagcaagatcgaatggttccctgggttcgtaaaggtgatcaaccccagactttccatcgctactaccacctgtacgcggaaggcgagctggagcgcgacatcggcaatgctggcggtcgtgtgctagaatctgggtacgagaaagataactggtgggcgatcgcaacccccaaaacggctcatgacgtatgaaaatgtgatatgcgttccgagagccagcctcggagtcatggcacatcaattcgcacttgctggccccgccaaaatttctgcaaacaaaggaaaagaacgcaacaaacaccgaggggtagaaatcatctatacgattcactatccccacaaatcacgatatacctccaaccggcgctatgcaattcgtaacagaaaaatcacaaaagaaaagaaaaaaaaggcaggggaaactcaaggaaagacgtatagggcgtcatcgtcgtcgtcatttcatcctaaggcatggtccgggggggcatgccaaggtgatggcccatgaaatttggtgggggaatccccatctctggtggtcgtccaattccatagaactctctcgggggcggtggagccggtgcgtatgcagggacgcctgcagtgagctcttccagggagggaagttgaggtggaagtcctggcagatggcctgggattgcgcgtgaggaagatccctttctcggccgggatagagaggtgctggcacggcgggttctagtggttgggggatcgatggcagcactggagagagagaatggcaccacgcctgcgcgtcgagccatctcctgctctcccagctgccagtgcatggcctctgctgcacgccatgggatagccatttcctccgctaccttggaccacatttcggctttgaacctgccagacgagtgtgagattagtgaatttggtttcttgtcatccctatcccaaacctacctctcgtataaacgggctagtttgttcttcttatcttcatcccattcactgcggcgttccaagtagttctgataatggagacggcaactgatggcactgcggccggggagtcgtttgctgatatcctcccacttcatgccactgccacgcagttcgatgatcagggcgtcctcatctggcgaccatttggactgcttcttggctggagattcggacgtatgcgagggctgcaggcgcttggcagcacccgatggaccggacttggtcaagggtggcatcaccatggcagccgggcctggcatagtcatcatgggacccagaccgagtggtggccctatcgttctgggcgggtacccagtgttcaggccgggggcggcttcttcctcatcttggggcttgagtagcagtgagatatccactttgacaggaggcaatataggccgattttgtaacgcaatcatatgcgcggatgagcaccggtgaatagaacagagaacaaagcagcagggggatccccgactagaggggggaaggggataagaagagaaaagagggaaggtgctcgtggacccaagtctttcccaaaatatgacagaacgatccaacgttctccaaagtgttcttttttttttctcgaattgaattggatgaaatctccaggatatcagagaatagaagtgaggggaaggaagtatggaaattgaagaattcaaggattgtagaattggtacagaaaagggagaagaaggaaaaggacgatatgaagcattcaactcgaaggtgaaacgaatgcagaagtgacagctgatctaaacctatcttgaagcgaagggaggagaagaagagtcttagaccgttggggggtggactattaagggtaacggctgttacaaagtaaaaaatacttcaatatccactggttttaattaaagatgcggtcagttcccctggtctactctgggtgatcttcgtcatgctggtctggatttttagatcatccatcctggtccaagtcctcaggcttgcgatatcactggaatggatataaatagggcgactctcgagagctatcgactgcaaagtatatagacgggcaatgtttgatatgacctgcagagtttcatactaacccagagaaggaatgaggggcaacgttctatgggaccaaacggtatgtaccagagtccttaccataatgtaccaggttaaatgatggctaaagccgactaattaattcaaagtaatcccaatggggccactcctttgggtttgtgtttttatttcaaacttaaaaaagtcaaaattaatccagaaacattaaaaaaacattcaattagataataaatatataataaataatcccaattcaatttaaatccataaatcaagcccggggacccgcatcaccctttggttaaatgagaacggtcttctccggtccagagtccagcccgttgcaactaaaagttccagatctttaacggctttttgggaatatcttgaattccttgggggattgaccaggatatgtcacccttggaaccagtcggggaattttctgtgattattcacttccaaggttcttccccccttgctcttgtttgtggggcgttcccgactctcgggtgtccatgtgtttattccttctggtataagtaccttattaaagagagagagatatagaggtggtgggcttcgaagccgaatggaacattctataaggaaatatctatattttttttttttttctttaatgaatccaggacctgatgtctcgaatctggttctatacatctcatagatttaagattggtagggtaatttgctttccctcaggctaaggtcttagaactggctcttgaacgacggggcacgcgttcacgcatttccaagattaagggactggtgggtcgaattcaatttccacaatttccacaatttccacctttttgacagccaatttcccgtacaatgcaattctagtgcacgtgatgcctctggacccagaaaccgggcatcggcttggggaagtcttattccacggagtagacaatatagtactctaactatatcatacactctatctatgagtatatctttacttccattattctatccattaccacggacttccctatatgatactcccctttcttcactccgacgatcagtcttcctgaaacctccgttcagtcaatgcaccgaggatcagcaagctatccctcttcctgttcgtactttgtactcccgggcctcgaatcctgtctgtcaactttccaacccatcaggcaacaaaaaggcaaaggcaaaaaaaaaaaaaaaggaaaaaaggaaaaacagaaagtcgaacgtgtaagtggatcatgtacaacgttcgcaaggcgatcgttgcctcccttggcttcgttcggagccagcacagacatgacccgttcggtagctacggcttcatcgaccttatgatccgcttggagcaacgggggggctatccgtagaccaatgtctagattatatccgagggggaatgaccggtataatggggagaggtataaaagtaaaaggaattcaggccatgcttcgagggcctgggggtgggagggagagacaaaagatatgttaacagtcagacgcgggagggaagaagccacaagtgtgatgatacaggatgtcgccctactctaacggcgcacacaccgtatgtacagttgagggggcaggttcagccaaccatgaagaatgaacggggtggagtttcaaggaggggcaaatgtcggatcatcatgactatgacttaagtggtagcgaagagctggtggcgctgcgcggagtgtttctcttttctatttattgtcgcgatcaccctaaatatccgacacgcacccgttggacccggtttttttggtcgtttttgattcgaagctcattattttgccattggtatcatttcagatggatgcgagtgggtttctcttatatctcactatgtatgtacctaccactagccacatatgcactgtgaacggagaattaactgttccacttagatccgtaggatcatctgcttcagctccagtggcgcccaaccgtttgaattggggcagtgcgctcaacggtggatcttcggtagatggggaggaaccctgctgtcaacactccctacggagtacactattttgctatggatcatcgggggaggccatatttgttccgaaagtggatgtatctcaaatatgtacgtatactaacacaaagtacagagaggcacagagaagatcccgacaagagaaggagcacggtatagctttcggccggacctcttgatattccatggccaatcatcagcctggagatttctatttcatttggctccacatctgaaacagctgctgtgtggtcaagtcccttctagacactagacactttaggtggaacgcggttcatttgcacggagtatttctcctacacttgctccatatgttgtagtagacttaagattatcggtctcgaacattcttctgcaaaaaccgggggaacacggccagcaaggaaattggctgattccagcccgtttatggtcccattgggccctgggatctgactgggaagttcaccgagatatcctgggaagctgatttcagagatgcagtacatttttttcatctctctttgaatatgttctatgtgtgtgaacagcccgctatttatagatggtttctttgttgtggatgtaagtcggcttgggatctggtaaatggaacagctcaaagtctgtgaaggaacaaaataatcaagtgtaagtgggatgggggttgaatgaaagttgaatgaatgtctcgagaattcagtagagttcttgcctttctttgatcaccatatccctgattcattggttccatcatgcattcaaagaattcccaatcgatgccacattttccttggagatgagaacaatgaaaatcagttgcaatgcgagataaattagactgcgaccccctcaagtgagcaacagcttcacatattgattcatttcatattctatcatggccaaaactaaacaagtcccaaagaaagtcctagaggaagaggaagaggaggaagtcgaagcctcaacagcgcaaaggggaagatcagacgaagagaaaatgagagtgagtgtagccaacctctacatcaacaagtctaacaagagagatagaccgtcatccccaaacattggcatccagccttgcccaataagaccaccgtgggcttgcccaatgcccgggttgactgctatcgaaatgtcgtcttccaaatgcttctgcatatgccgattcttcacaattggctcatctggtatatgaaccaccatgcccctaggggttacgtttgcaagatgggtgaagatttccgcagatgccaagtttgcgaacttgccgaggtcttccaaagttattgggcaaatgaaactagaaattggatctatacctttagatatctagcaaggacgatcttacttaagtggaaaccaaacggcgagaattcggaacaagacccagcagagtactttgtgaaagtttacaatgccatcaaagagggcatcaggcctatgatgtatgttattctctccatattccccctacacgcagaagactgacttgagactccaggaaaggagacttcgaagatatgttcgaggtcggaatcatccagaggagagaatgtgctggggaaaacccctgtgccccaagatacaccccgagccagcaaccggtcatgctgctcccattttcagagcacaacacactccccgccaggcctactttgggcgatgtagtcaaacaatactttgaaaatgtagacgatctcggtacatgtccggactgtggaggcaagaagacatccaacgaccgaattggacgttttcctgagcttctcgtgatccagctcaaccgcgccaatgattttggccaaaagatccaaacccacgtatatctgaccgagcagttaaatatcgagacacggttcatggatgaacgctggggcaacgaacgaaaagtcgtccggtataaactgacctcgatggtcttgcattttggccagcatgtacaatcaggtcattacatgatcgctgtcaaaggtaaaggaggtcaatggtctatggcgaatgacactcaagtcaatgactgggaccccgaaggacccgagagcagcctggactatcccgctacctgttatctctttacataccgccggttacccacggaagacgaggcagagaaaatcccagatgacgaggccattcaggccgactccggtttatgctcggacgatgatgtgtttgagaatgttgatcctggcctaggattacctccggtccctgagaatactgtcgttaagatccctgagaacactgtctttgagaattctgtctttgagaagtctgtctttgggaattctatctttgggaactctgtctttgggagctctgtccctgagaactctgtccctgagtcaggcgccagtgtctggggagttgatcccaggacattggagaagttactggaggtgatcattcccaaggccgtcgatacctatatagcccgctcagcggatgcgaggcacaaggagtgggatcaatggtcgaaggaatgggcgaaggaatgggagaagagaagaacagccgaaggagcgaacacaacagccaaaggagcgaacacaacagccgaaggagcgaacaaatctgctatttgccctggttgcgacaaggatatggtcaattggcagaagcaacgaggaagacttcaggtaactttgactgaaaatcaggggaatggggaaaagatcctagacctcgaagttcaaggtctacactacaatcgactcaagaggaaggtgggcaaggaagccgataaggcagaagagtcagcaattaccaaggtgataaaaaaaaagttgaagagcacagcgaagggagatgaagagacggagacggagacggagaaggggaagggaaaggccaagccaaaggtgaaggatacagcaaagggagatgaagagaaggggaagggaaaggccaagggaaaggcgaagacgaagggaaagaagaagtagaagttcaatatctcggagtttagttttttcttcagttttcaatttcaatttcaagtctcaggtttcttccctctttctaccacaaatggattccaattctcctcacatcttcattgatcgtttaatcgctgaattgtcacagccggcactgtcaaagactataaaaccactgatgctaacattgcactgtctgtttccaaatgacttcctccctgctcttgatatcctcgatcgcaaactagtacgtcggattgtacgctcagatcgatcttccacatcccagatccaagaggacattttcatcgtattatctacatcaattccgccttcacttcccggctcctcaatcccctcccaagaaaagggctatgaggttaggctgcgtgcctggaattgcagctgtcctacatttaccctgtctgcataccgagaccctcaactcctgcatgattcgacaaacaaacagaaccagttggcctactcatttggcggaaccttagctcgtggtacggctcgggtgtcgcctcctacctgcaaacatattctcgcctgtattctacatgcacggtgccctgagctgttcggggttgatggggatgacaggctcgccgtttccaaggaggaactggcaggctggtgtgctggttggggtggttgatttgcttggctcttgacacgtcaacgcaaatggatgtacgatgaattttacgcacttgtgtttgtccttgaccctgcggcaagctgctaagcgaccttatgaaacccatcctaggtatctgcagatgacaacaagtcctacagacccttgtccattccacatgagccatctgcccgtgtccggacaatcaatcgttcaaagtcggctggccccgaatggagacttgtcccggagctcttaagattgcgggatgattgtatgatagatacaccaatggcagtgttattactttacgagatagttgttgttcgctgtgcaaattagacagatctaaacataggatcttggccctgactatccaatgtacatgagatacaagaaaccccggtttaaatgtggtatgtttaactgattggattgataatcctttccggaagagaataaattaagaaaagtcccctagttcttcttcttgttcttgtcggagctatcctgctcctccttctgctcggcgtttggtgggccggccttcttagcatccttgtctcccttagttccattggcctcctggtcccgcttggtgtcactctcctcttgctgctgtcggttctggatcttgttatcgattaagtcgtggaaagccgtgatagcacgaatcaagctgctgatgtagatagccatcaactggtcattagtcttgacactcatggcccgtgccaactcgctgttctcgatctgcggctcctggccgctggtccgctgcgttgccggtggggtggacagattgggaaggaggttgaaaacatcctggaggttgcccagaatggcgtggttgacgggaagttccttgtcgagaactttttggaggtattgaccgatatcgcgtagccgcagatgcaatccttgaagcgactgcagctgcgacgtgatacgggtggaaagtgtgccgactgcgacgtccctgatgtctcggaggaggtgttccacgccaatctcctctgcttcttctgcctcgattatcgacggggtgtgcacaaatgtccgggaagttgttgttccatcctgcaagtaagaaaaaaaaaccccctggttagcgctgatggcctgatggacgcttcctcggattcaatgcaaactcacatctttgatttcatccacagcgaaataagcatctgtaggtacaccaacctcctttggttgtacatcaacaataaccagcaaggggttgggcgtgtatttcttgaagagctcattgatctccaaatccgaagcgcgcagcttgggacccgagtggtaccagccgactagcttctcgcgagcattgattttcttgaacatatccctcatcgactccacgaagttgtgatctaaaaaccacaccgatgggtctttttcatcttcctcgaacgggactagagagatagaacagatgtcaactcatctcttgtatgagtttaattcatcgaagcttgcacttaccagcaaaactgtttgatacccggacattatcgcccgagttctcacccagcagcacgcctacaacacgttttttggtaccctttgctgttctcccatagtgatctgcgacggagaggaggactaacggggcaaccgtcacggagcggttgacgagggatagcgtgtccgccgtggtggcaggcatcgtcaaagggagaaaaggtgaaaaggaatcgagaggtgtgaaggatgattaaaggtcgtagatcaaataaaatccaatgaaacagcaaatcaacgcgagacaggaggatgcggtggatggagagcgatgatgcacaggtgctcttgagagctctccgccacagctgcgccatcttgaggctggaggacttagtaagcggccaccttgcactttccccggtgaactgaggaaacttggactatggaggtgtatagaatgtatatgtatagaatatagaaaagagagagtagatagagaagacagagaatatagagaatatagttatagatactgaatgtcaattgtatcagcatctaacctacacatcgcctctacaaaatgtcttcaggccattttcccccattcccccattccctcgtgaagcccgtgctctccgaacctcgggagctaagttcctcgcgaatcttccctttccccatttctccgtttccccgtctacagcttttctcttcttcagaactctccccccttacaattcacaatggctcccatcactgaagatgccctttccggcctgaagaacactatccaccagctggaggcaaaggtgtccgagcttgagaaccgtctcgccaatggcggcaagcccaagtctgtcgccgaacagatgcgcatcatcctgatgggccctcccggtgcaggtatgcgattgaactataacgggaaaaagaaaagaaaaaaaaaccgatggatattaacagtttcaaccaggcaagggtactcaagccccgaaacttaaggaaaagttctgcgcgtgccacctggtgagtagaaagtttgcatgagtacagcatgagctcttcccgctgatacatttcctgaataggccaccggagacatgctgcggtcccaggtcgcgaagaagaccgatcttggaagggaagccaagaagatcatggaccagggtggtcttgtcagcgacgagatcatgatcaacatgatcaagagcgagctggacaacaactccgagtgcaagaacgggtgcgtacatctccatttccctcccaaattcattttcttccgaggcccggctagaattaacacgagagatgaacagtttcattctggatggtttcccccggacggttgcgcaggccgagcgtctcgatgacatgcttaccgcccgtgatcagaagctccaacacgccattgagttgcagattgacgactctctgctggtggctcgtatcaccggccgtttggtccaccctgcctctggccgctcgtaccacaagatcttcaacccgcccaaggatgacatgaaggacgacatctccggcgagccgttgatccagcgctccgatgataatgccgagaccctcaccaagcgtctgtctacttaccacgcccagaccacccccgttgtcgagtactacaagaagaccggtatctggcgcggcattgatgctagccaggagcctggccaggtctggaagagcattcttggagtcttccgccagtaagcgattctgttggattgattgcatttaaaaagggggatttgggaggtgatttgggacaatttaccggtccaggctccgtgatgcctaccttttttcctatttttttctttgggcatatccgaagtatggctggtgttctcgtccacatatagacgtgggtttatcccgttgaccgccatgtatagtagtagtatgtgtgtactttttgtgagtactctttgagtaccgaatacacaagaccggtacgcattcaattggatatgtatttggtaaatcttatattctgcagtctaattccttccgacaaggcaacacacgcggagatgtgtgtatttgcctcatactagtattgttcaaacttgccctggaactcatatctaaagttgtaggggatactcagtcgactcgatcttctgaggataggccaaaccaccctgctttcgcacctcatccatgacctccataatcacgatactctcttccaacggcatgccttcactctcgagcttgccatcgcggagacaacgagcaacctcatcagcctcccagtacatacccttaccattaccagggaacgggcactgaacctcacggatctcaccagcacccttcttgggaatgatacggtagctctctggccggaaaggtgggccgaacacctgaatctcacctttagtaccctgaatacggatggtaggaccagccgagcccttctcatcgggatcagcagagacgcgaatgttggtcatggctacaccgtgcgattgctgtgggtgcgggccattcgagggcgtacttgtcgggaaacttagaatcatggttgtacactcgtctgcaccggtgaggtggtaaggagtcatctgcgagagcacagtgggtggcctcctctggtctcgaggtagggtgtggtacagagtctggaagacccaggtcagagagtagatacccactagaagagcaatcagtcaatgttttctttctcttaagcctagaaaacctacaatccaggagagcaccaccggccaaatcagggttcaccatacggtgtgtggtaccccatttcgtctcaacatcatcaccgaagctcgtatcagccacgacacggaggacctcaccgatctcacccttctggatgagcgcgcgaatctgaacgctgagggggaaatagcgagtccaaacggcttccataaggaagagattcttcttgcgggcaatctcgatgaggatcttagtctgagcagcgttgacggtgaaggctttctcacagagaacattcttgcctgcctccagcgcgagtctggcattctggtagtggtgggagtgcggagtcgcgacgtagataacatcgacattggggtcggctacgagagtctcgtagtcaccgtatgcggagcagggggttgtgattcctcgagccgagatgaattgctcggccctttccttggatgaggacgaggcgacggccacgacttggtgggctacgtcagaggcatcgcggacattcgggtcgatgagaagatcatctgtgaatgctgttcggaatgggttaattcatgggttcttgtcttatacacccaggtatgtagaagtgaaatcttactctcggcgatccagccagtggctatcaatcagttagctttgttttgttccttttcggtaatttcataacaggatctcgagatgtcatacccatgataccccatcgaacaatgtgtggcgccatgatagtaaacttgaagacaagagtcaatacaagcgttcagattgaattaaaacaaagacaagtttacataggaatgaattccgaggggaaaacaagcgggggtggagcggggcagcggggtcgtgtaggatcctatctaatgtacaacatcctacgtggatcctccgtgggtgcaacgtggatgcaacgtgatatatagttacattttgtaagtagatggactcaattcgctaattaacgccaggaagatattccctatgcaatgcaataatcggaacatacaagatcattagatctcggtcttgatgcgcatcttctgacttggagattcagtgccctaggtatggttagctctctggatatctaacacgcccaaagaaactcacttcggcttttcgtttgcccagtacagagtcgggtgtgctggtccgtgcctggcgcgtcggtgcagggccctttgtcacttcggaataacagctggcatgatacacacgacttccgaccttggttgcgtcttgccagatccagtcctgcacatcttcagaccaggtcgattcgaatttctcctggcagatggggcatggagtgtttcggagagtggcatcgttcggggctcgaatccacggctttggcggctcttgcttcgtattgccatccgcgcctgcagctccctcggcggtggtttggggatctgcagcgccgttctcatcgccagcctcgcgggatttgatccagtcctattggagttagaaataaaactacaagggatacaagagatagacataccctttcgtcaacataccagctgcgattctgagcccgccgggaagactcggtcatgcgctgattggtcttgaagtgccagtccaagtgccgggccttcatttcctttccttcgtccgtggtcaagaaacgacggccgcaagttccacatcggtttggtcgggaatcataaagagagacaataagcccaaatcgagggatcttcatagatgcggtgctcatggggactccagaggatccattaggaggaatttgagtctgagacgaagctgatggtgtaggttgcattccatggggcaagataaacggcaaattagatctaccagaaactggtgttgaagtcgaaggcgtaagagatgggggtgtcggtccactaggtagaagcccacgtgccctcaaggccgcgataagaggattctccggtgctggtggaggagggccgctttggtgatattggggcatatgaggtagcgctgccggcatttgaggaggtggggtggactgttgacgcgaagcggtagttttgatcagctcggcgagagtgttatgatttaatagttgctgaaggggttgcgagactggttgcgctggtggtgtggggatttggggaggaacggacactgcggggccaccattcgtagcagcattagggccaaccgacggtggtcttgtggcagcaagggcagagacctgatcacggacaagtttcaactgatctggggcgagctgttgtttctgtagaattgcctgaagatccaccaatgctttcaagcgttgttgggagacaggattgaatggactgttcgcaaagtcaatctttgcagaagcgatcagagcatccacgtctcgattgaggtagctcaagtcgatatcctgtcgatgagtctggggaggtgtctgtgagaacccaattagcttcagatgtgacacacaacgaaagtagccttacagaattagaataaccattattgggatactggtggttttgtggaggccgagacatgttctggggtggtgtagagctgttggaccatccagtcggagtcccatttccacgattacgactgaggatgtccggttgggccctggcctgttgttgttgcaaagccgcagtgcgtgctttgatgagagcactctcgatgttgcgtgtaatgtcgggagggaagactgggcgtgtgtccaaggagcctggggccggttgcttccatgtgttgagcatctcatccagcttcctccgagtgtttccatcaaccagagtataaacattcataaatgtctggtacatgttccggccaaggaagagggtgtaggggcttccgacgttcttaacgatggagtcggctacatagagggctggaagcttctgcaggggtggtgtctacatactggttagtactcatcctgtactacgccaaaaaaaaacatcaggagcacctactgatcgaatgtggttctccaggacccgggatatggccattgcgtgttcggtattctctttggcgatgacagtcaaagtgcggatctggattccatcattggtggttaggtcctccaaggaactcttgtagtcctccgcaatttcgtccgaaatgagaccggacattatggcgatgtgggatgagtcgagggtgatctgggattttaaagatgtcgagagaagaaatcaatatcagggcgaagttcagcacgtggtcttgatttttttcctcctgctcctttcttccactgctcttgttccttcgagtgtgtctgtttcttttcttttcttctttttcttcttcttcacttcttcctttggggtggcttctgtctgtccttctttcctgtgactatcaagactgtcttcttttcttcttaatccttgtcctcgttccaaggaacaaattctcttggatcaacgcaaagatggagaaatagtcggaacttgtaaatgcttgctagctatcttcgcgagaattgagaaaacaatagtattcaaacacttgctctcagtccaatccaacccgtgaccttccagtgcccttgtatatctactttccagtcgaataatcgccgaggggtggtgatggaagggaagaaatgcgaggccgaaaagccgcggaccgcgaaaaaaccaagcagatgcggcgaaacaaaagagactaccaagatgggtaaatgcaagaaaacagcgctgtggaggagtgaagcaatggaaattgagagttgacaagaaaaggaaaaaaaaaaaaaagagagataagtgaaatagtgaagtggtgagtgttgaggtggtgaggtggaagcgccgaagagaaagggattgtgagatagagtcatgtgatcgtggaatgacgcattcaacttctcctcgacttggactgacttaccttccttcgtacattcaatttatttgaaagagatattattacatttttcaaatatgaagcttacacttgctaccctgctagttctaccgctggcactggccggatcgctcaagtccgtcatcgtcactttccccaagggaacgcctgactcggtggttaaccaggccaaagcctctttggtggcttcagtacgcagtgcttctttgttgtcatgaggctgttatgacactgtactgacacttttagggtggtgttatcacgcacgagtaccgtaagtactacatactaccttgcacatttagatatagagataccatttcatcggtactgacatacatctcttatcagatttgatcaagtatggttccaacggacgtttctgtcttataacctgccttctaactacgactttagtggattcgccgccgaggctcctgcgagcgctctccagaccctctccacgcaggatacccaatacaaaccgaatatcgaagaagataaggttgtcagtgcgtatggagactacgcagctgcagtctaatatgccatctccaatgagataccggttctgaatctcaaagcgcctgagcatacatatcatgacgtccaaaggcaaaaccacgtcggaatgaaccaatcagaattacaccatcagaatgatttaagtgatctaacgcaacctcgaggcttggattgtatacaatgtggagtcaatggttgagtccttatgcttcagctaagggctttagggggggggggcggacatatgaatctgataagtttacatttacactcaaaaacataactacaatgtattcattattataattcaagacctaagttatgtacttcgtacagtgtacttagtagcaaatcaaagagcgtagacaacgtagggccgatcatcctcccctccccccccccgctagttaactcccgtccctctggcccccaaggcgcgtggatctggaaagtccctcgagagccgaggccttcgcgttgcaacccttcacttcgagagtcttggaaatgctggaattgctggaattgcaggcctctttgacactcgattaaacgcgccgccaaaatgggatcggaacacacggtgaccaaggttctgttggaatggatcaacagcttcgccttgggtaaaaccctccgaaccactgacgaattaaccgatgggattatcttgtgggagattctccaggatattgaccctcagtatttcctcgaggaaatcccagagcgcaactcctccgaccattgggtggccaagtggcagaacctgaagcacatccacaaactattgctcaactacattcgacaccaaaacgatgacatcctaccttccggtctcgatccgtcgcccgatctcgaatcaattgccgaaaaagcctctcccaaggaaacgaacaagctgctgaagcttctcctgatcgcggccatcagctctcccaacgccggaacatacgtacaaacacttcaggaactaagcacctcgacacaagaggggctcagagatattattgaggaggcacacaatggccaatatgagccaatggacgctgcggatgagctcagggaagacctagccaagcacgatcgccctgtggatctggaactgcagttcgaggaacgcgtcggaaaggtactcgcggagaatgaccgtctaacacacgagaagaaagaattggaaaaggccttgggggacttgcacaatcgcctggcgcgtctccaggaaaacaatgacaccctacaaaaccgtctcgcctccaccgaggaccggctggttaccttgaaatccggaaagggtgatatcggtcacaacgcaaaggcattggaaagcaagacccgtcaacaggatgatctaattgcctctcaagaagcaaagttgactgcggcccaggacgaaatcgacagtcttcgcatggcagtcgagtccttgcgcgtcaagaaccagcgctatcagaagttgcaggatgactatgacgagctccgtaccgaaaaggatcaactggctcgcaaggcaaacgcagccgagaaataccgccaaaagctgcaagccagtcaggactttgagaaagagaaccagacactcaagaaccaaatcaaagatatccagcaacagctaaaagagtcggacgcacagcagcgttggtcttcggagcgcgatgtggaactggaagaatatcgcaagcttctgccacaagttgagcaggaatgcaatgagatccagaacttgaagaaacaactcgagttcaataatcatgcgctgacagaacgattggagagtgcggatgaacagcacgagagggacgatgctttgatcagtgaactacgtgaacgcctcggagaaatagacggcttgccgggcagcgcgtcgcctggctctgagacgccaaagatgcaagggacattgcacaaggactttgagacgcttggtgtcaaagaatcacaactgtatgtatacattttgccttcgtggtcttattggatgctaactattgacagtaaatctgaggatgatttgaagcgggaaaccgagtccgttaaagcaccttcagctgtatgtgtgccatctgttttctgtgaacgtttgttgatactaataaccagcagccagcctctcatactggaggcttctctgaaaactttactgcatccgtgcaactggcgcgctctggttccacccaaaggtatgaattcccgacatttcgttcgtttcagtgaacagaatatttaacatgccttagtgacgactactggaaattatacgagaactataccggagctctcaaaaagattgcagaggtccaggacaccttggaaacagctaaaagagacctgtctgatacacaagctgaacgtaagtcttttattgctctggctctacacatccgagagaaacatgtgtctaacaatcttgaagttggccttgtcaatgcggaacaggtcgagatgctccaaggactcgaggcgtataactcggctgaattagcaaaagtccgggatgactgggaagcccttacacaaaacgtccaccacctggaggccgaggtcgatgcaagccagacgctggtgcgtgaagtctgtgcggaacgagaggaactccgcaagatgctcgacaacaagcaaagcgagatcagctccgaagatcaggaagttatgaacgagatgcagatgcttctaggcgagtttgaaacccacaataatgagggcggcgaagtgccccagaaatcgagcttcgagctcttgaaacagtgtgcgggagttctggagaagaatgttgaacggcttgctcagcgtgccgaggtcagtttccacgagagatcctcgctacgtcttatttgggttgtgtttgctaattctagcatgattctacagtacatccagcaacaaaatgagctggtcaaatcactccgtgagcgtatgaagaactatgaagaaaacctagacgatggcatttccaaagagcgagaggtaagtcaaagatggagctgttaggttctagcggtatgctaatgacactttttagcttgagcttcagaacattatcgatagccagacccgagaactcaaccttgtgggctcggcttggtatcaccttcagagccgatggcagaacaacaatatgacggtatcgcgatatcgacatggagccagcacgggagattctaagggctggctagcaaagcaaagaagcgctgttgctgggtagtggaatgccctatgaatcaaattcgtgccatttttttttttaacatatgcgttatatttttttcgtttactggtttggatgttgagattcccactatacatcccatcttattcttgtgattatttctacagcaatagaatctatgtcatttaaagaaccccagagtcttgattgagccagatgaatccattttgaagtagagtgagttcgtcgcattcggaaaatgtaagctacctaagtagatccccgcaataaaagatgtctatggaaaatacaaaaagcctaggtaattggcctagtcccaagaaaggagaaatagaaggggtaatgcagaaattataagaaaatggtctctatacaacctggccaaaagcgggaatcaaagtctgtgccagccagaagctgaagaccagcttgggacctgtcataagcagcttgggggtcagacccttgaagaagctggtggggccctcattcttgagcatcgtggagacaatcttgaagccagactcggggttctcgaagttgcggttctggatacgcgtcttgatgacatcgaggggagcggacacgactagggaggcactagcaccgcagactgaggcgacgaagttctggccccaggtggcagtgttgtaatcggtcagtttgtaaatcttttccttggcgaaagcagatccaccgaagagctgtaacagatgttagtgggggtccagtgatagtagatcgggggaaagcatacagcgaaggacccaggggcgttacgggcggcagtccagccagcaccgcggtacagacccataccctcatcggcaataatcttgaaaagaccacgtccacggaaggcatcggggttagtctggcgcttaatcttaagaacgtccagaggaagcagaacgatctctccaatgccgatcaaactaaaagatttcgagtcagatagatccttacgcccaatttcaatttttcttaccttccagcagtggcatgcataatggcctttccggtacccttgccaaatgccttatcgaagtcggcacggtggtgcttgtcgaggtaatcgcgtgcgaaaggctgaccaccgtacttgtagatgcgctggaggacctatcgatttaaagaatagtatgagctgtctgttctcccaatcttctgctgtcgataaaatccacgaaccttgtaaccggcagcgtatcccagaccggggaacaaagaggtgaacttgcgaccaattgaggcattgacgtgctccctaaagacaacctccttgaaagcggtagcgctggagatctgtcaaggatccagtcagcaatagatacatcttcattcgtacacaatccgaatctcacccgggtctggttgctcatcaatcgcttggcggtagtgtcaacctatggacgtcagtgtctggtcgcaactggtctcgaatgggagaatatcgtacgggatggaagatcagcaactcagcaataccggcagagcctagaagagtcagatttgagtaatgagctcgtattttgaacatctgacgacttaccggaaccaaggagacgagcagtggcagactccttcttgacatccttggggacagcgccagcactggtggcaatagcggaagacattttttttccaagtttgtcaagtaatcccaaaaaagagcaagagaatgagaacgccgatggattcaggaacatgtgctcggagttaaattttatcgaggcagacttggcactagtcccgtttgggagccgccatcggagagccaaggagttgcgaaaagtcgtataaatatgtatgtatatatggaatcatatgtatagaataaaacgatgctacttaagaggtatcaggaagcaagttgcactgtctaatctatttattccgagtatatgactccatctttgtacatctttatatggaaataggtggaatcacaaccgcatcggagtcatttgaaagtgcctgaaacagattcctttgatacagcatgaccgtactccgtaaatagcacaagtgacaaactgcatcggcacttgcacagcgctaatatctgctgtgggggtgaggaactacttagggttagcgtttggaacattccatggtaactgccgaggatattcctagtataatcagatctaaatactcctcgctacctgttttgttgtttactcgttacttggctcgtggataaagaactcatattgctcctaagtgtaaatcacttcatctagcctgatcagtggttcgtttccaggtcggtgctccatcattgctcgacggtacaaccaaaacataaagaaatttgccaaaaggatccaagaatattaccacaaccagaaagctcataatgattgtagttgcagctaaagagcatagttgccaagcaatgtgaaagaaaatgcgcagaacaccgaatgaaacgccagtgacccaaaaccagtatcccaaggtcgcaaaagccttctcgcctgcccgttcatccattattgactcactcgtgcaggttagagtgaccgagcagcaaagcaaatgagagagactgaacaacctctacaggtcaccgaaagtgttctcgccagagtatctaaccgttatgtcagtatgatttcatttataaaataaaataaaaaaggagaacatacgtgatgtataagaagccatcttcgtccttgtgctcttcgtagatgctgctcatgagcgcggcagttggagggaggacctcatcaacgaagatgaagatagccttctcaggggagagctttatgcgcttgcggatcacatagacaaactgtcccacggtaaggtcggccggtactaagtacttcttcttgtcgatggtggcgatatctgacttctcgaccttctcgcagatgacctgtagattaggggagtccgttagctaccgaacaagcggtgagggtctgagagtttggcagcaacaaccacctccgttggggagatccctgggattaaagatactcacgggaatcctgtcggcgtatttctggcgaatgcgttcggcctcagcctttcgcttctcgaaggggtgctcgtccttgaacttggatcgcatcgtgactgataagggtcgataagtgagagcgggtcgcgtggagggtaagtaggatcaaaaaaaactaggaagctctggtgcgaggttggtagaaatagtggttttcttgatgggaaggtttggatgtgaagtagcttgcaaaaagagagatgaagaggggtgatagaggatgacaaggcgactcccccgctgacgttacggtaataccatcacgggatccatgggcggtgagtcaatagtcacgcggcagaaatcagatgcctcgggctctgctcacgtgaatagcaaggcatatattatttacatactgcatcagtagattaaaagagttacctcccaatatactagtcaggtcttgaatatctagacgaaaagcgatctcaatatcggggcttacacgtccacgggttattgccccggtgctgatcccggggccgcttatcgtgcttatctcatccagccaaacagaccaaactcagctctaggagagtcgtacgatttgagatgttgcgtggtattttgctaaactgttgactcaatccaacttcttcctcatatcattctttatacggatccgggataccgctctctcggtttcggccattgaccttttgatactttgtgctggcagccatacgcgcaaccaattctattccaaaatggccacccgatcatacacgcctctgcggaggtcactagggcagttgtctgctcgaagtactcgcattgctggccgccgtgctggaccctcatttcgcgggtattctacagagcagaaaccgcgtgagcccaagccattcactgtctggaggccatacttgcgcctcgccattggcgtgcctttcatcggcgggatcatatactcaatggtatgacacggcgcttcaaaatgcgaagaaatcaatttgctcattcattccagatgacagaagaagtcacggaactcgacgctccatccatggttgaggtggacgaggccctaaagcaatcgaaaatcaacgactcctcgccgatgcggttacggatggaaaagctcatcaagcaacaccagcagaagatcatcgaggaactaggcagagtcgatgggcaacaattcaagactgatacctggtcgcgccccaatggcggcggcggcatttcgtgtgtgctgcaggacggaaacgtcttcgagaaggcgggtgtcaacgtctccgtggtgtacggcaaattacctcggccggccattgagaagatgcgtgccgaccacaagtcctttgttggctcagatgtggagtcgctagatttcttcgctgccggtctctcgctggtcttgcacccacacaatcccatggctccgacggtgcatctcaactaccgctacttcgaaacgtcagatcccaaggaccctatcaacggggacaagaattggtggttcggaggtggcacggatctgactccgacctacctcttcccggaggatgctcagcacttccacaagaccattaaggatacatgcgatcgccacgatgctacatactacccccagttcaaggcctggtgtgacaagtacttctatatcccccaccgtggcgagtgccgtggcgttggaggtatcttcttcgatgacctcgacgccaacttccttcaaacatccgccggttcctcctccaacccgcaggagacactgttctcgttcgtttcggacagtctggcgtctttccttccttcctatgtgcccatcattgagcgacgcaaggacatgctgtataccccggaacagaaggagtggcagcagcttcgtcggggccgctatgtggagttcaaccttgtctatgatcgcggaactagctttggcttgcgcacacccaatgcccgtattgaaagtatcttgatgagtctccctcgtaccgctagctgggcgtacatggatcctgtctccggcacaaggacagagaacatgcctgtggatgaagatgacctgacggaggataaggccagcgagaaggagattatggatgtgctgcgccacccccgacagtgggcatgattgattcatatgtcatgcttggtatatggtgtcgtgcggtgttttcttgatttctatatgtatactacctaaaaaaactttgtagagtaaatgtggataattattgagctaggtgtctctacagccattcccacggcaagtcttaaagggcactcgagatttaatattcgggcacgaagcccagactgataaaaaaaagttttcattttcgatcgacttcggattgttagacagttgaagcaactggctctggtactatccacatctgtcttattttccgttcatataggcatatatttgtcgaccttacatcgattggtaagatggccgagttggtctaaggcgccaggttaaggtataccttgactccataactagcaatagtttcctggtctcgcaagaggcgtgggttcgaatcccactcttatcattcctttttgtttttcgctcatctaggttgcactcttttcctacttgcatttttctttttggttggacagtgggttatactatgattaaattcatcgagagttggttgtgcccgaggaactttaggccggagcttttgccgccacgcatatgaccatttttagtgatgaggttgttacaacccttgtcggatggttaattatatataatacatagtctatccagagcaatgctttattcctggttatccagtcgatctggtcatacattgctcggcgcaaataagtaatggagttgtgattgctgtctagaagaaatatagggattgtatggggatatttagatctatactcctgaggttaccccggtttacccaacatatcgggtattaggactggtctttccaatgaatatattttggttgtcaggacacatagatgatagtatatggctatcttcaactggcttttatcttaggaaaccaactgttgttctccccaaccacgcccggtaaaaagatatctccatttctgcgcgtctagtatacgctgataggtggcctgcttttgacctagaagattttgacctagaagattgccagtagagatacaaacatgtaattctcctgtatgtgccggggtgatgaatggcccgatacgaagcgaatcagtagaatagtacgcagtctagagcccaacgcatataaaaaggcatattaaaactgcaatcaacacctccccgtgagatctaccaccgtactatagcttggtggtgagcgtgatagtcctctaaaccccactatatcgactgttactactatcatggtctaaaaagatactggtttactaggaaagaacatattgaatagcataggatgtaacaccagaaatggctgtcgtggcggaatacaaatattgatttgttagtaaccattgaggtcttgggatatcggaaaatagcataatagtagcgatgactagagtccctctgtgatttcatcgttaaaccaccttcatagaaacggacaggcaagcggaaagggtgagagtcccaggcatatttgctcactggaggtattacatatgtttagtgaaatccaacgggatcctggaatccatggcatcgtcccagtgttgtcttcatggctgatctcatttagatgggttttaagatcggatcatggccccgtggtatggctgatatcttctcactagcactacaaccgaggacgacgcagccaagaaagtatgatttattcgttttcgctaaagtatctaggtcattcatgggattttggccgtttcctaggggaaaataacctagtcaatagtataaaagacttctgtactccgtatagatttcacccatggccaaattggcgaacaagcaacaactttggagcatgacctcaaaatccaccacccaccaaaaacaactcaattgatctaagaaaagctttatattaaggtggaatgagcaaaaaacaaaaggcaattcgatgacaaccccgatcaacatggtagatatgcttctctagaatcctcgcctgcaactgagccattctctctgtcgacgtcgtaccacgcagctatagtgtagtttgagaaataccgttaagatctttccatggccgagaaccgtgctttgtccctggtggcatggttacttgctctggtttccatgatgaagaccgatcgaagttcgatgtcctgtagggtatttacagttgtcacattctctggccgatgttcaatattgtgatgcgcgcgcttatgtgctgtccatagcccaatgatatggtgggttttgagggcgtgttgctagcatatatattctctctcacattggtagggactgtggggaaactcaaaatccacaaatgaattcccctacatgtatgatttggagtataataaattgaaatgaatatttattgatactaagatattcgacctgtaatgtaaaggaaaaaaataagtaaaaaaaagtaaaaaagaagtgataagagtgggattcgaacccacgcctcttgcgagaccaggaaactattgctagttatggagtcaaggtataccttaacctggcgccttagaccaactcggccatcttaccaactgatgtaaggtcgacaaatatatgcctatatgaatggaagacaatgcatacgggacgaaaccctttttaataacatggaagtatatttattgatttgagaatagtagtcgaatagcactacaaggctacaaaacatacaaggacactctgaaaaggcagacgttttactaaaaagaccacttttacgaatatcttcgtagtcaaactagcaaatccggcaaaaatgctggattattagcccaatttagcaaagacagcataagtatcacactacatatttatactatttttttgaagcatatgagatttcagctgatacctagaattatcccaggataatatcacctcgaataatccatattgtaaagaacatacaacacatggagtagccgacggacagacggggttctagccatattctgattcccataagccgaggtcaaagcccgtcgccattggaccgttacacagaacagcgtagatactatatgccgtacatgcgatgtaagagtggcattgataaaacctttagcgtaaactctgcaatgattaaaggacaggttatgataggcatgattggctcctttttgttgtttgccgtcattggtattgacggtcgtccggctgaagggttggaatggccgattcacgcaccgaacatcggatgatgttctgtctgggggttgatgtcaccaaacggattcatcggctgtcggaattcaaggctcggagaattgaattcatgtttggaataaggtgttattatggcattggttattgttcctgtcggaattgtagttccggtctccaattgagattcgaagccttgactcgacgaatgagataaaagatgagagcgatatcgatacatttatgctgtactccgtacagatcccgcgcacgttgagaaaaactgttgtattcaatgggtatcgggcctgtccataggtctaaactaattatgaagttatatgagcaaatgcatctagactacaaacaaaactttccattccgaaaaccactgcatggcagaagggtatctcaaaccttctctagtgcttcgcagtgacactgtcgccggtcagtttttcgactgcttctttggccctgttcggtggaaaggagatctggttagcccgaggtttcacatgaaaaaggaaaggtggatcgcaatgacgacagggtaaggggaaaagtgtggagaatgcgaggaaagtggcttacatgtcaccaagagcaaccatgcagaccgtctgccagatgcccagaccaatacggggagccacaccacggtagaggccgcggatgccattgttgtcgtagatgtacttgaaagtcttgccgacggtcaagttcttggggcggttagggtcaggggtcttgctctgcatctcgacacggataacctcaatcggctggttccaggcggacagaccaccaccgagagccgaagccaggatcttttcccaggcggacagcttggcgccctcatccttgttggcaaccttgcggatagccgactcagcgagacgcgacagaccgaagcgggaaccccagttggtagtctggcgaatcgcaacggcgttgacaccacggttaataccacggatgccctccttgcggtagatatccatgaaggtcgcgaaggtgccgggaggcttaacaccgctggcagccatcttgtgcttggtgatctcgaccgtcttcatgcaggtacagaaacccatcgtagcgtaggcctgagcgacaccgccagccataccaccgctgataccggagacgaagtcattggcaccgaatgagcgggcgtagtattcggcttcggaggcgacgaagaggagcaccgcacccttggtggatgcctcaatccaggcccacggaatgagtccctggtagtcttaaacatccgatctcgcaattagtttgagttcgtcacatcttgcgggtccgccccccacgcgctagctagacgtgggaaattggaagcgggtattgaatggacacttacaaccgaaaatgccgccacggccccaaatccgacccatagcgcccgcgaagctatcgccccggtttgcggccatggttgtcttggtcacctccagcggcttggggatggttagttgcaatatttattaactgaccactgagggatgccatacctgtcccaatgttgtaacctcaaacaagttcaatcctgcgcccagcaacaagttactgaacttgacaggcttcttctcgagcgtaggggccgaggccgcggacgtagttgtagacattctgggatgatggatgcgctgaaaggggccctgaccaagggatataacggggcttcgtgcgtttgaagaagggggagaactaaaaaagttgaagaagatggattgcaaatgcgtaggaagttgggtggaagggagagaaggagaggagaaggcagaatagcttataaggtcgggggaatcaaagctttgggtcagtaagctggggggggggacagctagtacctggtacatccgatcgtcaccgtttccacttatatcattgggtacccagtacctcccatcagcctcggaaggaatccacctgcgtacttcggagcagttcgcagagcacaattattatttctattttgtatatccgatcgcatgtttgtttacttttacaatatccatgttatatactatgtattctatccatttcacttctatatctttggtggcatgtggagaacgttgagcggtgtcccaacaatatccccacgtgatcgattcaacacaggtagtcctcagaccgaggcgatattctacgctgtacgttgagtcctggaatgatgtactatacaattacggaatagtgttatctttctacatatggaaggtgtagatcataaatgatttgacatggaagttctgttacaaggcccgctcgaaccgatcaagtccctatcatacaacatgaaaattaccaaagactttctcggccaaacaaaggagataatacaaatgtctaacccgggttttcaacgggccccatgggtgatattaaaaaggagatgggaaattcatgcgcttaaagcttggcaccgaccaacttggcgtaggcctcagtgctgaaagacttggggcgctcaatgggcatgccaagagcacggtcgatgatcagctggggcaggacaccaatggcacgggacacaccgaacaggacggtgtagtagctagcctcggtcaaaccgtagtactggaggaggactccagagtgggcatcgacgttggggtaggggttcttggtcttgccgtgctcggtcagaacgccgggagcgatcttgtagacctggctgaccagcttgaacagagggtcatcgggcaggtggcggagagcgaactcgcgctgggagacgtaacgggggtcagtcttgcgcagaacggcgtgaccgtaaccgggaacgacctggccgctgttaagggtggcccagaggtagtccttgatggactggtcgctaaggtcgttgccaatggaggccttcatcttggtgagccagttcaggacctcctggttagccagaccgtgaaggggaccggcaagaccctggagaccagcggacagagagagcatgggggagctcagagcactgccaaccaagtgggtggtgtgggcgctgacgttaccaccctcgtggtcggagtggatggtcaagtacagacgcatcagctcaacgaactccttgttgccgccgaagccaagctggttggccaagttgaaggcgtaatccttatccttctggacagcggcgaccttgccatctttgaagacgttgcggtagatgcgggaagcaatggtgggcagcttggcgatgaggtccatggagtcctcgaaggtgtaggtccagtactccttcttgttgacacccttggcgtaggccttggcgaaggcagactcgtgctcgagagcggtcacggccagagagaactgggccatggggtggagggtgttggggcaacgatcgatgagctcctcaacgaacttgggaacgtcggagcgggcagcccactcggcagaaaggttgtgaacctgctgctcggaggggacctcgccggtcaacagaagccagaagagaccctcgggcaagggctcctcaccaccgggagccttgggcaggagcttttggcactcgggaatctagaaataacagtgagcaagtaataaaacgaaatccgagtcaatggaaacgcacagtgtggccgcggaaacggataccctcctcggcgtcgagaacggaaccctgaggaaaaaaaatgttagcgttgtcgtttgccaggggctatcgaaatttgcgatcttacctcccaaacgagggacttgatgccacgggcaccaccgtaggcctggtcgagggtaacctcaccaataactgtgctgccgtagtccctggaacaattgaatgccatggtcagctactgtttcaatttcaaatacagagcgcgtcacatacttgcggagcttcttgaccttctcgatctgggcgggcaggttatcggcgaaggtgtccttgagggactgggcgattcaactaagttagcattccattgaagctcgctggaaggacaagcaccataccttggccttagcagagtagcagcgcgcgccgttcaaggcagcggactgcaccggcttcgcgatggaagaccggagagtggtagtaccgattctgagggaagaagccatgtctaatatcaggcaggatatgtggtgtgtgtggtatagaggagatggggaagtggtcacaaagcctgggggagaagaagaaagaaaggaaagaaattggggacgagctgttttgcgcctaagattttctcggttcttttcccatctggccgtattacagccggtaccgttggtacggtaactgggcttacttcgggacgccgtggaagctcagtcagctatagctctctctgcagggtgacatgggcttgtaattttccctacacggtacggaagagcacgggctcgggctgccggcagatcaactgtgatgctacgtaggagattgcgaaataccgagagatattaattcaggacatgtgttctttttgctatatagtaaggatatttaggtcgatgagattatgtatttatataagatttatataactactaaacagatgcacgacatattcgatttattcaccagccctgggctggcatcaacatacgtaatcaattccatgcccggggccatggatggcccgggggcattccccagttccaatgtttccaaatttcgcgggcagtactccgtactgtaaatacagttcatatcgtatctctgagaggcaggtaatgacgtcgtaaagtcgccatttgttccgtgccgccatccgtccgatatggaagtcctcgcttatcagatggatataaggacatggatgtccacggatatgtaaatatatctgtacatatgtcatagtgcatgtgatggcgccacggccttgaatagccaatcgccgatcggaagccccagggcgattcggatcccaagtcctatgttgtagggctattcattgtacaagatatacagtacaattgttgtacaacggccttttctaaaatggttcaccgaggctgggagctatatagggcggtagccaggggcagaaccggattggtaaggaccctcggctccgaggtataactagttaagacgttatgcttcatgattattggaatcatgcctgtcaaggtccttgatttctatctattactgtttagtagactctaattattttcccggtcattcctttccacggtgtaacttattatggtacataaaaatgatagtaaaacaaggacacattcatcaatatctgaaacctcaatgtttactgacatgagccctgcgctatttaaaacatagaggttggcaacaatcacctcgacctctctttttagcccctttttgctttactccgtagtgaggcctccaacttcagatatcagatataagattaaaagaccccggttacgggcagcagccaaagacgcaatttcacaattcacgtgacatatccacgataggactagcgctagtcgcagagtcttcccctttgatgacctccattgagcttcatcttcatcccccccatctcagcatccttcttcctctcgatttcatcggtttctcaacctcagttcatccgctaactgcgctggacttcactggatcctcttggactccgtaaaccctgatctggtttctctctgggatctcactgcaaagacgctctaggctgtacatctcccgtactccccgtactctcgtactcggcgctaggtaccctccctggacacaatatcgctaggctgtattccagctgtaggcggctattctctggtcgacagtgaatgcgcccgtggagtctgtagtgaagaatcgccagggactcgattaaacatatcttctttttttttttcataccgaattgacagtcgcgtcacgaaacgcagtagcccggccccctcgattacttcctatctgcataaagacttgactggggacgtgtttcattcattctttcgctactccccttccaaacggtagtatttcccgccatgtcttctgcagtagctgaactggagaaccttctccaatccatgctggccctcaagccgcctggcgtatctggctcaaagattggtggcatcacaaacttgtgcaatgccaacgtgcaggtacgcttgtcccctttggtcgattgattcatctcattggtcctgtgtgatccatgatatgctaaccctacccacagaatgaatcagttctcatccagaagatttacactcacttcaagaaggcccccggctctcacaagctgggtgtgctttatgtggtagactcagtaactcgccaatgggtagaggctgcgcgcaaggccggccaggttcctggcggtgatgcgccggatggaacttacgccgctggtgtcaagcgtgtcactgatctcttgcccatcttgatgacagatatcatcaataacgccccccatgaccaaaaggtatgtaatgagacatccctgtatcatcaaccccatatcccaggatcgcagccctggtgagatagtcaagcttcgcatattgtatccttgcctcgatgtacttcgatctgaagatcctgctgccctgaccaaaccgttttggacaagtaactgacacacatctcgtcaatttaggacaagatcaaaaagctagtcgacatctgggaacgtggtgcgacttttccggccccgatgctcgcttcgttcaaagagaagctgaacgctgctcaaagtaagtccccaatgatgtcaagatatgccaccaatactcacaatgcactagatgtcgaatcgaacacccccgaaggatcccctgcaccgaacgccaacccgatcggaatcccgcaacaatcggcgacacctgatacctcgagcatcctgaaagctttggccgatatggccaagcagaacactaccgcgcctgctgcaccttccgcacttgcgccggccaaccctctgggtgctttcaactcggcctctgtgacccctgccaatgatccaagttcgcatatggctgctgccatgaatgcactcggcgccggtggacctgtcgcgactccctttgcgggtatggccggcatggctcagaacccggctctccagccgcagagtcaaagtggaactccgatctcgatgcccgccgcgaacccgctgacctcaatgcttcctcaggctgcgcaacccgccgcacctgactcaaacgccatggcacagcagctacaacttctccagatgctcgctgctcagggaatcccccaggaccagtggggcactgccttgcagctcttcagcatgaccaacaacaatgccatgggcggtatgccgggtatgcctgggatgcctggaatgcctgcgatgcctgcgatgcccggaggaccgatggctggattcaacccgatgcaaggacagaacattggtggatggggtcactcggactcccagaacaaggacgatcgtggccgtgaataccctcgctcgccgcccactggatatcgtcgtcgttctcgttctccgggctgggatagacgccgtactgcttcgccccctcgccgtcgtgacagccctgtctatggagaatatgaatcgcctggtcgtcgtggagacccgcgtgatgctcgtggccgtcgtggtaatgagtatcgccagcgtagcccacctggtggccgtggcggtagacgtcgctcgccttcgcctgctcgtaacaaggatcccaacctccctccccctggacccaagttcattgaatgggactattcgatcggccagggtatgattaaagtcttgagccgaactcttttcgttggtggtgttacctcctccgaggcccacctgcgtcaactctttggtcagtttggaattgttcagacttgcattgtcaatgtcgacaagcgccacgcttttatcaagatggttagccggaccgatgccatgcaggcacgtgatggaatggaatcttaccgtactggcgagatgcaactcagggtaagtccttctcttgtttttattatccatggatcttatcactgaccttatcaatatagactcgttggggtgttggctttggcccccgtgactgcagcgattaccagactggagtcagcattattccgattgagcgattgaccgaggctgaccgcaagtggatgctttcggcagagtatggtggaactggtggacgtcccattgaatctggaatgattgttgaagagcccgatattgaaatcggcgcaggtgtctcctccaaggctatcagccgccgcattgccactgacactggcggcaagcggggcccaatttccactcgcactaatcccaatccccaggacactcgtttcggcggtcgccgtcctgagcgtgatggatacggtggcggtcctcagatgggtggtgaacttgacatgcctaatatgaacaatcagggagccgcacctgcagttccttcctatggtttcaacttcgctagcatgcccatgttgccccccggattcatgatgggtggtggtcagcccggtatgcccggtgcgcagcctccttccggtggccagggcaactgatttttcttgatacctcattgatgcgtgcacatatggtccaaataggttgcgcgcaccgcgcatggcaaagacgttgggggattggactttttttctttctttctatctcgaggcatatcatttcggcgggggtaggttttcgttttttctgcacttctcttacctttaatttccacaattgttcatgaggtcaccgatgattgttaaatcagatggatacattagggtcaaacaaacttatgacaaaattcaaataactcatttacatgatcccatggttccctcgtagggtttttcggcgcaatctttttagggtaaatttacagacatgtcttacttgtagtatgcatcttttaaagtgttcattgatatcgtatcgaggtcatcactaagttcaccaagctgctatttagtgtcctttcgcattccatcttcatgctcgaaagcattttcatctgtcagaaccatcaagcagtacggtccggcagagcctttaatgcctggaacgattgctcaaagtcggcaatgatatcgtcaatgtactctgtgccaaccgaaatgcggattccatcctccttgacaccggagtcacgacgctcctgctccgtgagctgctcatgggtggtggaccaggggtggatggccagggtcttagaatcgccgacactgcgatgtgttagtaaaagcattcaaaggagagcgaataagaatgaaccatacttggcaaggttcgagatcaacttgaagttgtcaacgacctgagcaccagcggcagcgccacccttgatgcccacagacagcacaccaccaaagccgcggggcaggtacttctttgcgagctcgtgactagggtggtcctccagaccgaggtatgacacccagctgacattctcgttctcccgcaaccatttagccagggcgagtgcgttggttgcgtgtcgctcgcatcgcagactcagagtctctatgccgagtatcaactgctgggcaccgaaggggttcagggtggagccgaggtcgcgcaggatctcaacgcgcactcggatagcatacgcaagcgagccgaatgtctcccagaacttcaacccgtggtaaccctcggatggctcgacgaattgggggaaccgggtagcgttcttgccccaatcaaactttccactgtcaatcacaactccagcaatggtggtaccatggccaccaatccacttagtagcactgtgcacgacaatatcggcaccgtggtcaattgggcgaacaaagtagccacctgcaccgaaggtgttatcgacctaaagtaaaaatcataagctttgtatcctcgcacgcttctcaaacaagcaacataccacaagcgggacacccttctcgtgtgcgaccttcgcaatggcctcaaagtccggaacattgtagcgggggttaccaatagactcaacgtagacagccttggtgcggtcatcaatggccgcagcaatatcctcaggattgtcaccctgaacaaacttggtattaattcccaggcgcgggagcataaccttgaactggttgtacgtgccgccatacaagttactcgtggagacgatattgtctcctgcttgggcgagggccgagatggccatgaattgggctgcctggccggaggaggcagcaacggcggcaacaccaccttctagagctgcaagtcgcttctcaaagacatcgactgttgggttcatgattcggctatagatattgccgaactctttgaggccgaacagcctcgcgccgtgggccgagtcattgaacacgtaagagctagtcgcatagattggaacagcgcgtgagtttgtggctaaatcaggttcgtgacttgagctttaggttagatttgtctttgaagtgaaattggacacttacccagcatgaagctgcagggtgtcgaagtggagattctcggacatggttcaagatatcagaatgaagtcgaggcaagagaatgtccactagttcagatttttcacactctaaggattgaactgaagacagagaaactaaagaagatcaagtggaaaaataaaaaagggacgatcttaagatggcggggagcaaatggtggggtgcagatggcgtgattgggggtttatactccgggcatgttcctgcatttgatgatacatgtatgttaggtatgtgttagctagtcttgcttcctttgagcctctttaggcaagagagactacattgaaatcgaatatcttaggcttttctgtctacgaggtatatacaacagtgaggattcgctggtgtagcccgggtgaagcccattctgctgatcaagaaagaagagagaagccatctaaaacagccgatcacacgcgggaaaagactagataaagaccaattctttcagcttgcccttgtcgaggaactcattgatcctccttctgtcaggcgaaatcattatctcagatgcctcttgactttgccagatctccggggtgtaatataagcttggcaaatcttcatagactagatggagattgctccggatgaatgtttcaaatctgaccttctccatggatgtctccttgtcggctatcttcctggaagcctcggcacgagctatagcagtcaagaaaatctggatccagaacatcttatgtgtgaccgaatcgacccgaggacctgtcattttctctgcttgctccaatgcagtttttcctggcaagccgttctctgatcccattataagcttcctatataaatatagtagcatgtgcgaatgggtggatatactgggagaatccgccattggggatccagccagtgcctgtacatcctggatgacccagattgcttggaaagaaaggcactcgatggttggcaacttagggctattctgtagcagagcagtctccatctgcttgaaaagagcggcttgcttttgggattgggatgagatggtgatgacatttggtaccggcttgaggtctggttggacaaatgccatacgtgcggaaatgctattccagaccttctccgagtaatagcgtttccaagtagacgagttcagttcgaaaagcgcgctgagagtagcggagctaatgcgtgatgcagggacgtcaactatcgacctttcactcgttgaactccctggagctgcctcaagtgactggatagcagcatgaactacttgaatccagaaataggcctgtgtttcggaataggggggaacggatgagttggtcgttctaaggcggattgtcgtcatctttagcgaatcaagtgcttccttgaccacttgaccgcgccgagcgcctgaagtgagagtgtattgaacaactgcaaaggcgtattggaggagccggtccgggttactgatttgtccgggaagagaatcatgatttagacttgatagtccaggcacgggtcgcaggtcaggaagtgaccatgactcccgtgccgtttcagaaaacatatgctccttgctgtagtatagtctccaaaggccggtgttcattaatgacggcgtgtagaggaggacttgctgaaagtcattccaggatgggaatttttctttccctgtgtggagtttgtgtttcaaaatagcattctgcagttgtaggagccagaatattgtcattgttctttgatatttcagcacaagtcctttgaaaggatcatccgatttaggtctcttaccgatgctctgtatttcgaaaaagatcgggtttcatcgttctcagtctccttatatgcccaaggaaagtttccgccatatcgaacacattcttcccttccttgattgactccaaagtaataatgaagcctgacttgaggtgactgcgatggtcccaccctgtcaaatcagcactcaaaaacgaatgccaaaattgccgaggatccatattatcttcggagccttctttttcaattcgtactttgagattgtgatcatctgatgcctcctctttctgcgactgctttggaacagggtgcttagagatctgttgctgatggtgatcttgttctatgctagtgatgaaggcatgtagatcctccataacctgcttgaccccttccccagtcttgccactcacaggataatcaatgactttgcatttgacagaatcgtcgaatatttcctttaatcttttgccatataccaagcgtagatgatcaatatcttgtgcagacagagagtcttgagagtcttgcttgttaaagataatccataaacttctataacccaccttgagcatttctttgccaatgatagagaggagatcgaggctttcttgtgtgtattcctcatccatggtacagtcatggaagaacaagacggatgtgtctggggaacaaacgtatgctaaccaatttgggtaccgaaagcatcccactagatgcgtttagaacaaggataagttgtccagaaaggagaattgacgtacttccagtatcccagatcatatatgggtgacatttatactcaaaggattcgaggtagtggcctatggttggaaatgcatcgactgcttgaccgagaataagttgggaaagaaaggtagtcttcccagatgccgcctctccaagaataagaacttgccgttcagaatacccacggagccatttaataacgctttgcagtgccatgggagccacgtcaagagtataaaatgagaaagacagagtatcgactgctgatcagagcaacctcggctccagggcttgagctctggaggtggatgagtcagtgtactgaaatgcgctagtccggttatggcaactcttagggcatgtactacttttcacatgccaatgataacactatcctaagacaagccgtgtgcttctgtgacatagtcgatgttgaatgccgatatctgaatcagactcgatacagaagcaagttcgtcgtctgaatacacccgctcttttcaccattccagatttcagatatgtttcctagcgcaaagtgaactgagctctaacccgaacataaatgccataccaacatcgaaacaaaaatcttccgcatttcccacggtctattttagtttattaagctttactccatccatctccatttgactccattttgctccatttgactccatacatcctcaaatggattcgaaaaaagtggacccgcgcgggattgaaccacgaatctccgaggaaccgcatgaaaactcccgggggatgtttacataagctcggcgccttaaccattgggccacaggtcctatgtcgcaaacccgtcgtggattgtctacattataagatgacttcctgtatccccaacctctcccaaccccaagcccgtacaatatacagagtatcagccttggttattcacttggtttgtatgtacaagtgccagggccaccatcgcccccaatcagactgatctaatccaatgaatgatgaatgcgataaatgcgacttatggacaccacttgcattattctggagagcaaagtaaagtgaaaatcggtttatcggagtgggtcacgtgtgtggcttcagccctaccgctctacatgcaaagactacaacatcaagggcaccttgctacttgctgtatgatcactttttcgggttcttggtgtatattgcagccttgtaatatacagagtgtgataaatggttctctcgatccatacactccgatatcaaagggccaagggtacatctgtcttcatctacaacgatctgtagaaatgtcgacttgatactcttcatcatgcctggttcaattaattattgtctctggtgtgagttcaaagctaggatatgtgttgcaaatgcagcgcagatgcaggaaaccaaatagatcagccatacctatagaaacaccccctttacttgagatgcagatctctgtccaggtgagaataggttacgttctggccatctacgggatgttttggtgtcatgcaaccatatgcagtcatttaaccgatctgacctatggcgttaaatttagtctataaggggaatagttcgctgtattcttttaccatgtcatattagccgtatcattctttcgatgaaccaatcatttcaatgaacttctgtttttctttattctcgcctctcgtccggggccccgcatcccagatttcatggggaatctccagaagtcacataatccccatatgtattggccaattgaaatagaatttgaactattcccagccttctctcccaagccagttactcgtaagcgccacaaccttcctagtcagccagttctcgacgccctcggcggtggctaaccttttctagtcgcagctaagcctctagcccgtctcggcgttggccactctcggataaattgctgtagcagtcgtactttcgggaaacgggtaataccccggcgggacaggttgcatccctatccatacgatcgttgacttgtttgacaaactctcagatggcagaattagtccacgtatcacgcgcatgccatgcagctctgcaaacgcgcacaagcggtaagatataaaagaccccagtttgtcctttttgcgtttcccgagcttttgattctcattccctttttgacctggaaataacgactatttccgaaaatgtcatccgacaaaagtgatgacttgtacgagaaggctgccgttgagcaatctgaggtcttggtcaacaaggacctcatgaaggatgccttcgatggagagaaccgcgaacatgagatgacaacgtgggcggccatgaagagccacccctgggcttgcttgtgggcattcaccatgtgcttcactattgtgagtttatgctacttttctatttcccccgcatttcaggttcatctcccccggatctcgagatcatatcagctgatccatataatatctaccatcaggtgatggaatcgttcgatatgttcctaaatggtaactttgtcgcgcttcccgcgttcaaagaacggtatggcgtcgacgtcgagggacacggttacactatcccgaccaaatggcaaagctccctcttccaggccggtcaatgtggcgctttcgtcggtgttttcttggccggtcctatcaccaatcggtttggctaccgcttgactaccatcttcgccctgatccttatgaacgccaccatttttatttccttctttgtgagtaagccaaccccaacggttgaacttattctctaactgcacctaggccgactcactcactgtccttgtggtcggccaggctttagaaggtatcccttggggattctttattgcaaactcccccgcctatgccagtgagattgttcctctctccctgagaggtgcctgcacggctactcttcaaatgagttggtccatcggttcaatcattgtcgccgccgcaacctacggctacaataagcgcaacgatgagtgggcttggcgagtgcctcttgccttacaatggatctttcctgtgggtcctctcctttgaggtatgtttttacatactgactccttctagactcctctcttgatcctcctcttcttcgcccccgaatcgccttggtggctgattcgccgtggacgcaaagcagaggcccttcgttccatcgagcgtcttggtagtgaatctcatgagcaagctcagcagtcgcttgctatgatagaacgaaccgttgagatcgaagctcaaatgggcggtaccccaactcttctcgaccttctcaagggcaccgatctaagacgaactatcatcacctgtttaatctacgcgtcgcagaactttgccggtaacttgattgccaaccaggcaacttacttcttcgagcgtgagtagttcctcctctccttctaaattctcagccgcaatagatgactgactccctacttagaggccggcatgggctccgaccgttcattccaactcaatctgatcaactcgtgtcttcaattagttgccaacataatctctttacctctggcctcttcatttggtcgccgaaccatctatctctggggcacagtcaccaacatgatcctactcctgctcctcggcgtctgcgcctctatcagccagaatacagcgaccaactacgcccaggccgttctaggaatcatcatctccttcgtctttgccggtagtctcggacccatttcatacaccatcattgccgagagctcctccgtacgtcttcgcgccttgagcaccggtgtcggtcgtgccgcgtactatttcgccgagatccccatgatctatcttgcctcgcaaatgcttaaccctactgggtggaatctcgctggaaagtgtggctacgtctggggaggtaccgcttgtgtctgctttgtgtcggcctacttcttccttcctgaactcaagggccgctcttaccgtgaaagtgatatcttgttcaatcgcaagattcctgcccggaagttcaaatcgaccgttattgatgtcagggagaacgagtaaggcatgacgatatgaaggaatgagatatgcttttgtgcttctgaagcgtggtaaatcagaagaaaagcttttatttaaagaccattaagtcctctagtaaacgttgcaaccattccaccgagtagatgtgcgcaacagatacattcgcttcactctaccaatacagtggccattggtacagaggacactagcaaatctaccactaggaaggcttcatcgtaatataatatacgcagttgatgctaatagacgaaataggaagcataggtttaacactcaattcggttgtccagcgcccttatttgacatttttttaatagccatgagctagaaaattgaagtaatgctcttctacttatgagctatgtagattcttattcagtttggcgggtacctatgtaccaaggcggttaggtataaaagttcgtaacttttataggaccacatttatagttaggatggtgatattatatgtatgtcaattagaagattttattgcctataaggtggcaaatactttaaatgaacgatcacatctcggtacatttgggaacggagaaaatctagagaaatatagagcagggttacacgtggatgagctagttgcccatatgcttagctctagtcagtgaataagatacgaggtctgagcagtacagcggaaaggaaaatcgaatgaaatagcagaggatcaagtacctgtgtaggtagaaatagtaagaatagtacaaccaaaaatgccacccttgtagttaaaacaccgacgctatcaaatcacaaaaagaaaaaagaacatacatcacaacacaattgcgcgaaaactccacctgcagataggaaatctttcaccgtcccatagattgcgtcactataggataatagaagatctggtcatattggtaatacatcatcacggggaactcttcgtctcagaactcttcatttcagaatttttcgtttcagagttggcaacatcgtttggagccttttcagattgaacgattgaagctgacgttgagctctccttgtagggcttgtccgacagcttggcctcggcggcggccaacttggcattggttgcgtccaaagtcgtcttcagggccttgatgtaatcaatggccatctccacggcggtagccttgctgatagcctggttggccttttctttctccttttccttctcgttggccttgcccccggattctgcggcatccttcgcgctgcgtgcatcgatgaattcctgcggaataagaagctcaatctccttaagcgcattgttgattcgattccggcgcccctgctctgcgagcttgtgattcgtgcgcttggagctcaggttctctgccagggcctctggatagcttacacccgatggcagagtgccgtcgagaatgtgttgatagttggacttcgatgcaagataaagcgcatcttgtgacatgcctataatatagtcagtataacagggatgaaattcaattctggtcaaaactcaccctcgttgcctttcataagcggctgaatgctgggactaatcttgggccgcaactgtgggctggcctgagtggaactcaaactaggtcgtttccgattagacgcagccctggtatctgatttccgagggaccggaccactaggagacggcattgcagttgtgcgtggactgggagcaagagaggcactgagaggcttatcgtgcgccgaaggactcaagaaaggtgttccattcgtggggattgacggagtccgtacagcggtgtcgatgcggttgggtctcggacgcagctgcgaaggagcggccgcctctggaagtgatatatcttccattatatcatctgggaactcaggctctgcaagctgcgcttggccgcggaattggcctgcggggtcttgcgaatgctgattccgctgaatgcgcatcaaaagcgcaggggtggcggcagtaccgggagaagagctttgaacatggggagcaattgcaggagacatccgagggggaggaagagcgggagggggcatcatcggttctgacaatggctcaggggataccgagtcctggccggaaccttcattgctgctgagctggagtgagcggatgtcctgattttgcggctttgtcgagttcatctcctgggtaaggctattgtagaactcctccgaattggtagccaaggtgctgcgtttgcgctgcgcccgaataatgggtgattgcttgaccttccgtgtgttattgagccgattagcggttgatggccgctgacgagtgttgggtttccgaataatgctaggagaaggtggagccgagcttccagggagagggttcacttccgtagttgtgggaacgaagcccatgtccgaaacctgtcttgcgtggtactggtaactgctggattcggagttttgggcctcgagggcgggagaggtgagaggtgtaaagtattcgccggggattgtgtattcggggagtcggaattggttctccaggggcgtcatagccggtgagataagaggagtgtaaagggccttgattgttagccagcaaattcattctcggatttgtgtcaagactaacctgttcctcgttcatgcgtgaatatccgtcgtacatatccgtttcgtccacgcgatgggggtatcgggcggtattgccatgcatctcgatactgttcggggtgggagggatcatgttgtggccctgcatataatgttggtgggtaggcggttgcgacataggcgatggttgctgcgcgcaaaagcctggcgtcatatggggagtcgagtaaggcattgagttgccgtggttcgtgtgcgactgtgcgttatcgttgaaatccatgaggccctccatctggcccgagtattgcatgccatgcgatcgtaggtgagccatatccgagtctgggccggtggaagttggtagggaatgggaatgttgcatattccctgttcctggtccgtgctcgatttcggggaaaggtatgttgaaatcaaacaggttggaaaattcttcctcaccaggcgcactgatgagattattctcatgcagctgctctggccacgacatggctggttgttccattttttgtaaaaggagatatccagttgggccaattaggccgagagagaactgggtgttgaagtagccacctgcagcatacagagaagatccgagaaaggaagaacccgggcaatcgggggggggggaaattgaaaagaagagaagagatgaagtggagaatcaaaaaccttcggggcggagacggtcctccgtggtcggcaacggcaccttgccactgtgttggatgttagacgaagtacgagcatacgcctttttaatcttattcctgcgctagatgcgcgtgtgcttatagtgcatgctgaaagaacctggtaaaaaagtactagcttactatggagtgctcccataggtatgttctccgtacttcgtatagtccaaatctctttttgtcccgtttaacccacagtggggatacggaatacggacaagcttccggggatatatgcatgagatttatatttctaccaaagtaagaaggagtagtaagtagtactaggtaacagttatgtagtcaactatgactcgaacatatcaacttcgagggtttcccaggtgcaggtggaatataaatccacatgcatggatacctcaggcagagattgaggggtttatcacctcgtgatatcggcttacctgagcaacaggcatgacatgatcactttagacttccccctggagagcttcgtaacctatttaacttcgcttgttcggtaatctttcctgtgagatatgccctcatgatgagacctactccagacctcccattctctcgcaaaccctccgaccatcccccatccccatccctcgatccccgcactgcaacccctgcgaccttcttcttatcgcggaatccgcatgtcgcggattgggattccagtatatcgatagatagccccgaggatgtcaaagagaatatgtatggagtacaaagcctagatacctctctgtcccaatcagaattcccatcctggccccgcaatcactccgcagaggacagcctgaagcaggcaaccgacgatttagaatcgcacctcgcacaatgccggtcaacgttaaagccgttaaactcagacaccggggaatcatctgaacatgcatcacccgctcatacagtgtctcggcccgtgaccccacttacgttgggcatccccgatgacccatcgtcgctgcccagcagccctaaatcaatatccaaccagtctttgcggccactcgacgatatctctatcacagatgaaatcaatagtcaggctatcggatctggagatgaagacgaaatgccccatgagtctccttttttgggcccaggtggggcggcctcccagcttatcatgccaagcatcaaaatgcctagtcggcgaccgttcactgagcgagggaaagctatgggacgattcaaggtccttttagctggtgctcctggtaggtttcaacagttctagagaaattacacgggctaattgtctcgaaaattaggttctggtaagacttcattgattaagtctatcgttcagacatgcgacgatatcgttcatgtcgacgccatcccacagatgacctcttcgggacgccgtagatcttgccggcctcgatctcgggggagatcgactgctactatggaaatttatgctagcaccaaaccttatccttcatggtggtcggatctggaagattcgcgcgtccttcagcggcggaaaagcatgggggaaattgtgctagagaggaatctctgtttcgtggacacgcctgcgacaaatctaagccgagcaggtcaaagtgacgctatcggggagtatatgagacaacaattcttccgtgccaccactgcgctcagtgggtctagtgttgatttccaaaatctcctagccgggaatggtggatcccaggtggatgccatcttatatttgatttctactggtaggctttttctattctatctccgagggatacatcccaaattaattcctggtcgctaaccttctacgtgcagataccctctcaacagacgtggaatgcatccgcaagctctgcgagctaagcaatgtgatcccaatagtatccaaagcagacaccctcaccccgactcaagtcactcacttgaaagtccgcttccacgaacaagctcgcgaggccggaatcaaaccattcctattcggtgatctgccgaacggtcaagatgggctcgaatcccaacccccttatgccgtctcttccgagaaatcagtcgatgccgaaacaatggatgcaagcactctaatgagtccagactacgttcaaccactcataccctccgaactagacgccctagtcacaaaaatgtttgatcgcgacaatctagcctggatgcgccattctgccgcaaagaaacttctccagcaacgcaccgactcgtattcgctcccgtcctcaatgccgtcacctagtgcgcagctgggtcctactgcaaatgggtccgaatatgcatatagcagctggcgttccgtcactggaacctctatgtcgcccggctctccccccggctatgccatggcccgcatcgcagactacacccgacatgaggagcgtatggcgcaggtccgcctcgcacaatgggcgacagacctgcagcgcagcctgcagaacgagcgcaatcgatacacctcgatagcccgcggcgagcgcgctatatggctcaccgagcggctaggcgagtgtgttatcgacggctcgttggtgcctctttcacagacgcctggcttctgtggcttgcatggcccgatcgacgagaagagccctggtgggttccaggtcatgcgctcacatgccggttccggggcggcgtatcgcttcgcgaagttcagtccgcatgacccgctcggcgtggttggctggattgacgaactcggacatcggagctggatgcttgttcagattgtcgggagtgtaggggttgttggtggtctggcgctctggcttgcgcgcacttggggatttccaacgcgcagtctttcggatttccgtgtcgattattggtgtggtactatggaacggtaggtcgatgagataatgagggtatgagtatgtgatattggctttatagagttagggtctcctagtttgttgtctgaagcgttcctactggatgggtttttgtttctctgctctttgtcttcggaaatcattgctatcatcttccttcggcgtcttatggccggtgtcttacggctctgggactattctccttgcggttcagggtcacgtagcatattaagatagggattacttcgcatggaagtgataaatgtgatttttatttgatttttattctgtgtgattcatcttaatccttttaccccgtctatcattgagattggacagtgtctgaactatatcgacttcgttttcgccatttccattcatagatccaaagatgctgcgatcttccatagcttggtaagatggccgagttggtccaaggcgcacggttcaggttaacctgatcccgatggtatacaactgtctccgtgtctcgaaaggggcgtgggttcaaatcccactcttatcatatctttttgcttttttgttgctagcattatcttttgcttcatagaataataacaaggatactagtctaatagtctggcagcgccttgtcatgtcgttttggtagtcttttcagcagtctccgtaaatttatagtattttctcgcccttcttagatagacggcggaaaaagacgcttaatttgtgcagacgacctccgtatgtatgacatttgattacgaacttagtaaaaaggttgttgttgcttttttttcatttaccttgctactagtgaagtatgtcgtcagaataggatgtagccaatgaacctctatctatatcaatcaaatcgacaattggcctgccaacctccagaactcacattgttgcatcgatttttttgtaaataatgctaggaatgtgtgatgtctatgtgttgcagttagatagcataggcgtgagcaagattgatataatcttagcctcggtcattactcttctgcatgaggtatactacaaacctgcatagatcttcgtcttaattaattctatgggatgataagatcaaaatccgggatattgctcgggaaaatggaagagcagggtccaacgaaagagtatgaagaagcaatggtcaatccctgcatgagattatatctcaccccaagattatggctatcacgagccaaggaaatccataggtctactggagagaatggaaatagaggataaggtacaattgtattacagtcaactacacccttaaaagaacaaaagagatatgggcaatgaatctaggcacaagtggtcacatcaaatccaaaacgaagggaacatagttttccctctctacggtgtaatgtatacagggattttaaacggtcagaccgaggtcctcggcgaagggcagctggtgaatatcacccacgctgacgagggtggccttgccagtcaggaaggtgttggcgacctacgggtaactgttagcatcatgacatcaacaatgtggatagagaaagaacatacctccttgacctgctgctcggagaccttctcgagagcctgagcaatctcgttgatctggtagggcttgttgccgtggatgaggccggaaccggtagcctcaagaccggtctcgagggtctggacggactccagagcgcggaacttggcgagagcaatagccttcttgatgtcctcggaggcgacctcaccggcggcggccttcttgagggcatcgacaacgttcttgctggcggcgccgacctgatcggcctggccggacagggtgacagtgaaaagaccggcatcggagtaggcgttgttcttggtagagacgtggagctggttgaagcccttggtggcctgcgacagaagggagaagccgggggtccacttgatagtggactcaccgcccagaagagcagcgagaacggaagcctcggccttgtagcctgcggtgccgaaagcgctggaaccggggaaggcgatcacaacagcattgccgatcttggaggcaatgcgctgctcaccaccgtagtacttggaggcgacggagggcagaacgttgtacttgctggaggcgtggctggcaggggtgtccttgaagaattgaccaacccacttagagacctcagcggagttggggccgctggcgacaagagcaatgttggacttggcgtaggcgctctgggcgaactctgcgagagcatcgccggagacgtacttctcgtaaggagaggtctgggagggggtgatagaggcgcccagaccgcggtggaaagcaacaccgtgggcggcatcgacagcaacggtctccgggttggagtggacggcctgctgcttgtacttgatgagcttgctgacaacctcgtgcaattcgtggtctaattttatggaaggggcccgagtcagcaaaagatgctcatataattgcgatccaccacgtcaaaagggactaactcacctgcaaacttggtctgggtagcaacctcggccagcaactctgtgaagtagggcagatccttggagaggaacttggtccggaggacaatgttttcgcgcgagtgtgtcgacgagatttcaccgcctagcagctcggtctcccgggtgatccgcagtgcagaccgcttgagggtagtctattgaggaattgaatgattagtatcaccaaatatacctgagatgaatcaattgatgccataagaccgaccttgaaagcgaatcgatcgagagcatcggagaacccagggaagggctggtaacgggagccagccttagcaaccagagccagggtgccagtagggccctgaacttcacggttggcgacctttacgccggaggcttcggagacatcgtactggaaggccgggttgacagcggaggccatggaccgacggccggcggccaaagcacgcggcgcatttcggctgagggaagatcgcgacagcatcgtcgcctgtgccgagaatctgtgagagaagaagaagaaatataaacccgaattgggtttgtaaagaggcgcaaatgaggcgggggaggaggtgggatgcggagagagcaagagagaagaggcagtttgggaggtcacgaaaagcttcaagatcccgactcgtcactccaaccaatcagcggtcaagtaatcaaaagcgcggacggaaccggagttacttttattgcgagtagtagttatataggacttttctattgtctttgtattgattgttatagtctaattgagcgtttttaaattcaaaatctctattctaaagaaagtcctgagtatctctattgtttcccccattgtctctgaacaacgttgctgaatgaggcatttgaatcagctgattggccatatcacgtgaatataccgataagcaaaaataagaacaaaagaacaattgcatctcatcggcggtggatttttggacctgcagatgtctgctagcttgtaaatcttcatgagcattcggtgacccttaggtgccccctctcgaggtttggtggtgaatcttctcatatctttagcccaccatgatgatgtctcaggtatgcgactgtcccgctaacctcgagagagctacttactgacatgaacgtagtgctctaccgagctttgtatgctcttgatcgaagacaattttggagagctctttgccgtgagtcatcttgtgcacacgctcgggctatcatggttctctgcgacagcggggaaggaaccgggctaactagtcaacttttcgcagcgcatctttaccgtccttcaacgttatgaaagactgactctccctcggttgagattctacgctcgcctgacagatcgccaattgcaccatggtctctccgctatgatccagcaccacctgatataccacttcacttccctcgatgatggcaatacctactacgaagctaatccacaagccgcatactccctcgtgcgatctggaaagattctccagcttgttgaaactcgattgggagaatacgcggctcaggtgttggaagcaatcatgagtctcggtcactcctcgatcgcccacctcgagacgcttccggagcttcaatccaagaggcagcgcattccgaatggggttaatcagggtgaaaatacggtcgaaaatacggtcgaagatacggtcgatgggaacggggaaaaggaagaagattcagctgctcctaacggcaatcatgttgtcagggaaaaaccggtgcaccttcatcccaccttgaagagtctcgcctctcacggatacatccatcgtcttcgagaggcacatttccaaagtccgaacgacaactggatagatgcttcccgaatcatcgcgtcaagaccagatgtcaaacaaatgaaaggcaaacagcaagcaacggagattgaggagaaggcgaaggacttggtcaaggaaagaactgaaggagatctgagcaggggcctaatatacaacggcctccctcaaggcgccaaaagaaaacgcgatcatggcaactcggagtccaataagcaggcgcctaatggcactaacggtgtcaacggggaccatgtagaggacgagggggaagaggataatgattggtcggaagatgaagatggcgttgattcaatcccaatggatgtaagttttcctttttccttgccacggcttcgggtcaactaataaccattaccagtctaaccttatcgttcgggtgaactacgagaaactcgacgtggcgcttcgaaacacgcggttcctcgaccttgctaagcaagatgcaccttccgcctcagttgagatttatgactgtctgcttcgtcgcattgaataccaaacagcccgctgccgagactcttatgaaatccctcgtgaaggagaagaaggcgagcaatattctgctccaattcaactgagctcaatcgtcgaagacgttgacccgaatctggatcttacaggatgtattggcccgatggagccctcaacggtgttaaaccgaggcggcaagcgaccattggatgatgagacgaatggcgtgaatggtgacgagcatgaagatgaaccgagcgggcagaaccgcgcctatggaattgaccagcaccttagtattctctcacaacctcccttgaaccttaccacaaaacacgtcatctccgggctcccaacgtggcgagttgcattccgaggcctggcccgcaagcttcgccatttagaactggagcgcatgattgaatcacggtatggagatgtggcactgcgggtggtccgcgtcctgcatgccaagggtaagcttgacgagaaacggctccaagaaatcagtctcctaccctttaaagatttgcgccagacgcttgctagcatgcaaactggagggtttgtggacttgcaggaagtgccgcgtgacgcacagcgccagccttccaagacaatctacctgtggtactacgatccagatcgagtgtgcagcagtatgctggaggatacgtacaaagccatgtcacggtgcctgcagcgcatcaaattcgaacgtggccgcgagagagattttctcgagaagacagaacgaaccgacgtcaagggccacgaggaagaattcctctcggaggcggaattagaacatcttcgcaactggaaggccaaggaagccttgctgctggcggaggtatctcgattagatgacatggttgctgttttccgtgattattgatttgctatgtttatatcatggaggctgggaagtaattggggttgcataaatctgtacaggcgaatgagcgacgaattgatacaaatgacatttccatgctcgttctgcgagtctatacctcagacatatgttggagatatgtagccatgtttccaaggtcgctccttccaggcgtagataaggtactccgttgccttagtaagtagcatacgctcaccgccacaaaaggaatgaatacatatctcagatgtgagaaacaggctttgtctctttagctttgtctctttagctttgtctctttagctttgtctctatgtcagtgcaggatctagaattcagcattcgtccaactctttgctgataagaagctatgatgaccttcaaattacccatctctggtatttttcatagggctcctttgtgggtattttctttttattttatttccttgccttcactcttaatatgattgatagatatgataaacagccttggaagtgcacgttctatatgttataaaataatccagacattttgtataacttggggccctgttccacgaagatcggcagccccgcgtcataggcctttcacatgcaccatttagccaagaatatacgagactagcgttgaatactttactacttcgtataggcagcaaagaaagggaaaaatagcgcaatgtattaatagagaccaggcggcatagtagtgtctaaacggtaatcaaaggacatcagagaggcgcattaggcagtataaattcaaaacaaaccggcaaataaacagtcaaagaatgcgggagaaaccaaaagtggtacctattcaaggcagaaataaacccctacgtcagccctattggtatcaaaatcgccaagtctgtaaatattaatgacgctggcgcgacgccggtggctgcccgatccctgcgccttgttataccttgccataccttgcctggggttcctacaaaaagggtttttttctgacacaaatccacagataaatttatttcacattcatattcacattcacaacaacataacatcctatcgaagatggccctcccgtggatataccccgtccgaatcgcccaagcactcttcggcgtgatcgtgatcggtttgacaggatatggtccgttgcttcagagcaaattcttgaaaatccatgacaactgacaagtctctagtggtttcattattctacaatggatggtcatactcggataccgtcaacttcctcctcttcctcggttgctggactgcctttgtagcagtgccctacctcgtcgttgcaccgatatggttccctcgccttgcacaccgctttgtgattccggctgttgaagtgatcaccatgatcttctggtttgctgggtttatcgctctgggagcgatattgcctgcgccgaggtggtgtcatggcagtgcatgcagctcgctccaggcagcaacggtatttggggctattgaatggtgcgtgtcttctacttttggttggcgttatatgatggtacatattgacagagagctaacaatgatttgtgtggcatatagggtactttttgcggtcaccagctatttcagtattgtcgatcttatgcaccaccgcggggcagaagcgaaaacacatacgaatgtgcagatgggagtctgaagtgtttatttgacttgatttggatatgataccctttgaatagcgacctttatgtttatcttatgaatttcaaccggatcataggtctaacatgtagtgtcatttttatgactaactagtagtagctccaaggttaatctccgcaaacggcaacccggccccgccaagcccgctgccaagcatgtggctacatgattagttgccacagtagattcttatttcaggattgacaagaggaatatagaggattaactagttggatatatcgcgtggaataagatgtacatgtagtctattctatgtacgtatccttgaatgtggccatttatctcattgatctgcaatgcatgataagaggcctcggaacattcgggacctggggatgccaaagacaaccgtggatctttcaaagcctcgaattatcagcatcgtgtgctttgtaatgaagccgagttgcaagagccgataagctttttatgtaactaggtacagttcgtggtccacgggtacatactccgtagttaactaactatcgcttccaaggttacgtacaacataagccgtcttaccaccccacggtacgccactcatcccacccgtgcccaggtgggaaccagacagaaatttctcagacagaaattgtaggattttaggtatctttacatggtatacctatacaaaaggtacataacttgagatatacgtaataatagatatcgtataactaatagatatagtatcaaggaggcctgttctatttggtattgtctctaaatggcagctcgttgatggctatatacatttcttagttatgtatggtattttatattctccatataagatatctagatttattattagccaatcaactaaacgagaaatttatcattcttcctctaactagccagagggagaaaataaggtagtattaggtatacgtaccttatatgagtgggctagttatacaaaagataactaattctgacaatttctgtttggtgagaaaaattttgtttagtgggacagacccatacatttccaggtatgggagcggtaagatcaaaagatgttcggacgtagtactagtctcgtgtgttgctccaccgaggaaaaagcctgtcttcggacttcttttgcctcaatcgagtggatacttgttgcagtctctcagatcctttctttcctctctttatcccatcttcaagccaccccctcttgccctagcaaacatggctgacaagtcagagggaaagatgagcggtgaattgcctgtgcaagtccaagcacagagcattgcctatgatatcgactatgagaagttcggtgcccagcgtgaggcgaacccgctgccggatctcaagcggcagttgaagagcagacatttacagatgattgccattggtgagttatgatgagctatatatcatcgatcaggatcttcaggctaatgctcttcgaaggcggcacaataggtaccggtttattcattggtagcggcaccgccattgctcacggaggccccgtgggcgctctcatcgcttatatcttcgttggatcgatcgtgtactcggtcatgaccgccctcggagagatcgcaacatatatcccgattcctggcgccttcacctcgtacgctgctcgcctgattgaccctagtttgggctttgctatgggttggatctattggttctcatgggcatcaacatttgcgctggaattaactgcaaccggtttgattatccagttctgggacagcaacattcccatcgctatcttcatcggcgtgttctgggtcgtcattatcgttttcaacatgatgcctgtggccttttatggtgaaatcgagttttggttcgcgagtatcaaggtcattaccgtgattggcttcatgatcttcgcgatttgtatgaatgccggtgtcggtaaagaagggtatctcggtttccgatactgggtgcacccaggtccattcgtcccctacttgatgtcccctacttgattgaaggaaacgattcgttggccaagtttgttggattctggtcgacgcttattcaggccggattttcctaccagggaaccgaactggttggtattgcggccggtgagaccgagaaccctcgcaagaccgtcccatctgctattcgcaaaaccttcttccgtatcgtcttcttcttcatcctgacaatcttcttcctcggaattctcgtgccctctagcgaccccggtctattggctagtcagggagatggtgcttctgctcagaacgccaacgcttcgcccttcgtcattgccgccaaccgtgccggtgtcgcggctctccccagtatcatcaacgccgttcttctaaccgtggtactttcagcggccaactccaacgtctacagcgggagccgtattctggtgggtctggcccaggaaggtttcgcccctcattggttcaagattaccagcaagcacggtgtcccttactacagtgtgctcttcacggcggcctttggtctgctcggattcttgaacgtctccgatgcaggtagcacagtgttcacctggttactccagatctcgggtgtggctggtttcatcacctggtcttcactgaacgcctgccaccttgccttccaacgggcgcttaaggctcgtaacatctctcgggatatcctgccttacaaggccatctggcagccctggtactcgtggtatggtctgttcttcaattgtctgatcattctcacccagggattcactgcctttatcccgaacttccaagtcaaggatttcttcatcaactacctgagcttgattttgttcgtggtgctatatgcgggacacaggatcatttaccgacctccctttgtcaagcccattgaagctgacctggataccggtcgtaccactgctgataatgagacatgggagactatcgagccaaccacatggcaaggcaaggcatggaagtggatttgcgattaattagatactgctgatctgtatattagttttttctttgcatattgcatattgcatattgtataggtgttatctttttctttcttttttcaatgtttatattccaacaatatatctacatcttcatacattatacttatacaatataccatctcggtccatgtgaaaatcagtgcatgtgagttgtccagcaaattgggtggaatatgtaagcagctccactcgggtaggtacctgagatactatatgaggtaccactctgtggcaagtacccaaaaacagccgaggtcccttgttcggctcatgtctttcatgtcccaaaagagtcggttgctccgggtttgttgcgactccagttttctcccccacactctttgccccctttaatatccggatcactcgggcattccttcctttctctcttttcttactcacatagatatccggttcgtcggcctgttgttatcactcattctctcgctgaccacagatcgctatcccgctagacatgtttttctcacaacctacccatttggctaaggccgaggagctcaagcaagcaccccccaaaggcgtcgcttactctgtggctcttcccggcaccgaacagcctggccgcagtccggtataccgagcatggaatgcgcagaaggaacttttgacaacactggaccccgaggtacagaggcgcacgcgcgaatgttagaatatctttatactgactgattttaggtcaccacggcccatgatatattcgagtcgaccgccatccgccatcccaagaatgactgccttggttggcgtccgtataactccacgaccaagtcctttgatccataccagtggctcacttacgagactgtgcagaagagacgcgccgcattcggtgctggtatagtagagctgcaccacaagcacgactgccatcgccccggccagtatggtgtcggtctctggtcccagaaccggccagaatggcagatcactggtgagtttaggttgtgagggcgaagaattcaagatattggacgctaaattgaaatcatgtacagatctggcttgcgtttcgcaatctctttactccgtctcgatctatgatgtcctgtccgaagacgctaccgaatacattatcaaccactctgagctgagctgtgttgtcacctctctacctcatatcgcctctctgatcaagctcaagccttctctcccaactttgaagatcatcatcagtttggacccattggatggtggtgagcaggccggtcactcgaagcgtgccatcttcgagtctatggccgctggtctgggcctggcgatctatactatcgatcaggttgaggagctgggtttggcctcgaagcgcggttacaatcctccttctgcttcggacattgtgactatcaactacacctccggaaccactggtccccccaagggtgtcgttctgacgcacggcaatgcggtggccgccacgtcctgcggtctgatcactatcagccaagcccgaggtgatacgtcggcctcttatctgccgctggctcatatatatgctcgtctggcagagcacaccgctttctggggtgctgcacggattggttatttccacggaaacatcgcggagttggtcgacgatttgaagttgctgaagcccaccggtttcatgtctgttcctcgtctttacagtcgatttggtagcgcgatccgtgccgcgacagttgaacagcccgggttcaagggcgctctttcgcgacacatcattgcggccaaaaccgcgaacatgaagaatcccgatccttccaaggcgaccgtcaggcacgctctgtacgatcgcatctgggctaagaaggtgactgccgctcttggtctggagcgagccagatacatggtgtctggctccgcacctttggatccgaccctacacaacttcctacgtgttgccaccggtaccgacgtccttcagggttacggcttgaccgagtcctacgcttcagctaccgctcagccggtctacgatctgactgctggcaattgtggtagtctcgcaccctgcgtcgaggcatgtctggtctccctgccagacatggagtactccgtggacgacaagccgttcccccgtggtgagctcttgctgcgcggcaacaacatgttccgcgagtactacaagaacgaggaagagactcgcagtgccatcaccgaggatggctggttccgcactggtgatgtctgcacaatcgatgagaaaggccgcttcatcatcattgaccgccgcaagaacgtgctcaagctcgcccaaggcgagtacatctcccccgagcgtcttgagggtgttgttctttccgagctgggctacatcgcccaggcctatgtccacggcgatagcttgcagaccttcctagttggcatcttcggtgtcgcgcctgacctcttcgctccatatgccagcaaggttctgggcaggaccattgcgccaacggacttggaagcggtcaaggaatctctgaacgacgacaaggtccgccgtgctgtgctccgtgaccttgagcgcgtggctaagaagcacaagtttgctggctatgagaggatccgcaatgtctctctcaaggtggagccgttcaccgttgagaacaacttgctgaccccgacgtaagtttttttcttttttttttccgtcgccgtaatcctagcattgctaacattattttctcctttctatagtctcaagctcaagcgtccccctaccgtcaaggtataccgttctcttttggatcagctctacgagcaggccgtcgaggagcaatctgctcccaaggctaagctgtagtggctccggcacttatttttatgcattattgttttccatcgtgttctcactgtggcatttggcaattcttcgcgggctcggttcaagaactgtacatagaacctgtctgtacattgtagtatattgaacattctgatagagttttggtccgcgctaccctcctctggctgtaggctactagtactagtttgggccggtcttctagcttttcttttgggtcttccttgtgagagctctttcttcatatgctgcttttatactttcgtcttttgcacatccttttcttataggtcttgcacagggcgtactactctacgccacactatgtccaacaaaaagaaaccacagtccttacctctccactgacaccataaattatcataatgttagactagctaacagaaaagcaaaaaaatctatgtccatagcctgtaaaagaaacaaaaaaacaaaaagatatgataagagtgggatttgaacccacgcccctttcgagacacggagacagttgtataccatcgggatcaggttaacctgaaccgtgcgccttggaccaactcggccatcttaccaagctatggaagatcgcagcatctttggatctatgaatggaaatggcgaaaacgaagtcgatatagttcagacactgtccaatctcaatgatagacggggtaaaaggattaagatgaatcacacagaataaaaatcaaataaaaatcacatttatcacttccatgcgaagtaatccctatcttaatatgctacgtgaccctgaaccgcaaggagaatagtcccagagccgtaagacaccggccataagacgccgaaggaagatgatagcaatgatttccgaagacaaagagcagagaaacaaaaacccatccagtaggaacgcttcagacaacaaactaggagaccctaactctataaagccaatatcacatactcataccctcattatctgaaatgaaattgaaaaaaacaaaaagatatgataagagtgggatttgaacccacgcccctttcgagacacggagacagttgtataccatcgggatcaggttaacctgaaccgtgcgccttggaccaactcggccatcttaccaagttatggaagatcgcagcatctttggatctatgaaggaaatttacctcacgctatacaggccatcaatatgttgtcgggctgagcgttgatccttgggtttcgggatatgatagcgcccatatatcattattcaaggagcgataaaatacactaacttagtatttagttggccaggtaggtcatagtcaatttttctatatatagcatgttcatcctagagtacggagtatctgcagtgcctatatatagcttaagatctggtggggcctatagagagtcatcattctaacattctattctcacttcccccaccagcattacgcccaatcctcgtttaccttatatttcattttaccttcttggccttcgcttaaaacacagctggaataaatggccgaccactccgagcccgatatcgtcttgtacgatttggcctgtactaagcacgtcagcttttctcccgttgtctggcgcattcgcctcatgctcaactataagaacattccttacaagactattttcctcgagtttccggacattgaacccacgctaaaagaactgtgcgttacagattacccttgtgttttcatgctttccagcactgtttacacgcgaggaaacccccagctaaccccgaatcaccaagtggcctggttccagaaaagtccgcatcgggatccaaatacactgtccccgcaatccaacatgtgccaaccaatacatacattatggactcgctcccgatcgcgcagttcctagagtcgatttacccaaacccacccgtaccactaacatcagaacttggtcgggagatcgagaccaaggcacgcggtgtgcttggcaaggccatctactcgtcagtgatgccacgcgagatccgcatcttatcgccacgctcacaagagtatttccggcgcacgcgcgaagcctccctcgggcaccgtcttgaagatctccttgacgagggcaaagaagagcaggtctggagtgatgttagcgccgccatgggcgctgttggcgagctgatccggacaaacaaggcggacggaccgtttgtgctcggtgcgcggccaagctacactgatttcttcattgctggatcccttcagtctattagagtggttgatgaaggggtgtttcagaggatgatcgggtaccctggctatggggaggtttatgaggcatgtctgtcttacatgggaaagagggattgattgaatcacggtctagactactttcaatgtattgtcggtcgggtcaaatgtcggtcgccaaatctaggaggtacacacaaatatgaagtgttggtcaggcaatgccacgcttgctaatttaattatacaagtttgaaggaaaggctgtgactttgatgtgcatgtatagccttggatatatatatgttggtctgtcgatggtccaactgcatattaacaacggttaactgaaggatatattactcaaggatagtaaagcaagatacaattatagtgttgacttataccacctaaggagttgacaagtaaagcagtataatgaatagcagcatgtctggttctgaaagcctgatttagtcatggggtcaggatcttattagctatctaagattttaagaataaaaaaatctctttaatttataaagctatatactatttttaagtacctaaggctaccttctaccgctacttctaggatatttaaaactagataattttatatactaacttattttgcggagcgaagcgaagcaattaaaaaaaataaccctctccccttcctagggggggtcgaatggcccccggagggaacgcctcgaaaggagatcatgtgaccaggcgctctctctactgggtcgaaaaaaatagaaatccagtcggtgaaaaagtaatcgctgagaaacggcagaatagatccagctggcagaaaaaaaaacaatctatctaatcagagtatatactaatcctaatgcagttagacaatagtattatgcgatatctactctgtagttagtatatagctaggccttcgtatctttctctcagctataagaccctacctatttattattatggattctggactatactctcaatatcggtatatacgccctatatatatatttcacttacatacaaatcgagagatccaatcgagagcgggcgcgaaagtggtttaaagtagtggtatagaggaagaaaaacaaataatgtagtttgtcttagacgaaataaatcggaaaattttttttttttatttacactgtttacattgtttatttacatatggcggcatgaaaaaagagcagttagtcgtttcgttctgcacaactatctcgcggccgcaggccggcgagatccctcgtattctttaaaggtattaagtactatatagttctctaagtcttctaatctctcctatatctattctatatatcttnnnnnnnnnnnnnnnnnnnnnnnnnnnnnnnnnnnnnnnnnnnnnnnnnnnnnnnnnnnnnnnnnnnnnnnacctatttattttatttacactgtttacattgtttatttacatatggcggcatgaaaaaagagcagttagtcgtttcgttctgcacaactatctcgcggccgcaggccggcgagatccctcgtagaatgaggatctgccacgcacgaccctaaaatgtatcaaccgcccaattctacatcaaaacacgaaaaacaagtcaattgagccgagaaaagctttagattgagaaaaaaacaaaaaagtaatatgataagagtgggatttgaacccacgcctcttgcgagaccaggaaactattgctagttgtagagtcaaggtataccttaacctggcgccttagaccaactcggccatcttaccaattcatgaaaggtcgatgagattatggctatatgaccggaaacctgtttcagctatcctggagtaataaaacctggagtctatgaattgaagtcaaagtactggagattcgagggtaatatacaggatagaatgagcatcaggctagttctgtagtggacttcgatccgtgaagcgatgataatatgggctaaagcagggcctactgaaggtcataggcatcgctagccaccttgtcccgtcaaatatttgccaacacatccaaagatatccggacacatccaacaataaatttgcctgactattttgattcaatcacagcgagatgggagacaattggacttgtcttcgccctattgggaacagcattattccatacacctgaagatgacccggtcttcacacatcgcaacccgtggaaacttgcaaagagcaatctcagaaataccgcaaccgccattggaaatatttgttgcgaactttgcaatggtgttggaacgattagcgatccattttgctggctcatgacccagaactagttctcttgacttcgatgtttggcaacagcggtaatcaccctttaatagtacccactggaaaagaaacgaatgactgaaagtcggatagattatagggtctggcaaaagctcggcgatctatctaccattgtttacgcatttggtttgcatcaatccggtgaagacatcaaagaaaactttccgttcttcttggtggagatacgaaagcgagtcatggtgtgcgcatacgcaattgataaagagttagcgatctctttggggcgtcccccacggatatgctctcgatattgttgtattccgcttccgttagacataagttatgacaagatgatcatcccacaaagcgaaggagaaaaggaaatgcagaatctcgacgcgcatggttggaacaccgaaggaggtctgaccgttggcgtcaggctgcgcgtcgtgctactaacgagcttgttacgggaaagtatttagaattgtctttgagtcctactactcaacatattgcagccagagttgagttcgtatcccattatagactttcttatattgataaagtgactgacaaaagaaaccgcacagaaaattgattcagcaatcccgccagatgcaaaaagaccttcccttattcttgcaacggtcccccgaagaagctgcagcaggtgcttacagatctgcacgagacgaaggccgtgccttcgctcacatagaattcacgtaccaggagtttctgctacatcggatcttgctcaagcgccttgggatcaactcgcgaggactcatcgaaagctctttggaaatagttactactctattagacattattgccatgcagacccagtctgctcaattggtggcgaatatgtcgtgggatgtaagtctgctctggccccctcaatactgccatgaaacgtttattataagctcatcattttctagttatgctatattggtcttcctgcagcaggaatcctgacttcgaaactgctctcggggcatagccctcagatatcgaatctattaccagccccgttacctgccaacattcgttcatttgctatccaaaagcttaatctttttgtctctcatctgatcttcctggtacggccgcacgaagggagttacgagatgggagttacgagattgcccaacaagggtcgagatttattcgtcgggtgctcgatcatattatttcacctaaatatccccaactgcctccggtgactccggatattgatctgtctgaaaattggctcgacggttgtgatttggatggtaatcttgatttcatggcgtggcttgacaacatccactgggcgcaggaccctttattaaatttcacctgactgaatcatccaatatatgccttcatgagacgcacatcaggattatgcttctcgcaacactaccttcggccattttcaaggtctattgttttcttctctttgaataaactaccgctcatgcggattatcctgtattatgtacagagctctatacggcagaagggctgctctaggaaccaaaattgccaagtcgtctaatacaaccgagctttgaacttatgtcacgtacatagattcgaatagatctaaaagagcaagaatttgtgtcataatctgtatgattatcaataatgttactctacggatcgtgatcattgtttgcttgtttgcttgtttcttattcgctattcgctatttgctatttgcttctttattttgctcatatatttcttgcacaatacctagccagagtgaaataaagccagaaggacacagagataaacctggcggctaggcaggcaggtacccctccttcgcaagactaatctaagcgtgaaagcgtaagcggctaatttctaggggagatatctcctttggaccgcgaagagactggacagggtatatttcgtaacgttgaatgtcaagtgactgaggcggatcaccagcaggcatgggggaaataatctcagtctgcgtgcatcttgggatcccttgacggtcatttctgtaaagttcgaggactccactgactgagttattggcatgcttcgtccacttaacaagaataccgattttgatcgctctgtttccactaatgagtaaccgattcatgtcatcaagaaggtcattggtattggtagctcaggggaaagaaagatgatatattattcctctcgtgggtaacagtcattatacgactcgctccatccaacctctgcgacaagagttggaaaggcctgcgatggggtgtgaagaaaagcatctggctcctttcggagcccgcgatttggaccttctgtgaatgacagtgctttggacatagtattagtaaggttacgatcaaagtcgtcagttgaactcacttgtgcctatctgaagaaggagaaggtctagctctgctaggttcaacctatcgtgcaggctctggaaattgagactgaaatccattcgtcaatacaattatgggcataagttagcatcattttgagtcgtaaacaacggctttctgggctataggattttcgaatagaaggaagatccttctcgacttcccagaggaaatcctcccaccctggtggcatgtcggtaatcaccagctcatgaaagcccttagcctcacgaagagtattgtgaatagcctcctcgaactgtggctgtcttgaactgatctgcggagaccacagtccacgatgagacgctcgacggagctaaagaaatattaggcattgcgatggcatggggacagaagtgatataaggcgagaagagaagagtagggtgttgaagaacagtatatgtattgcaactgagcggctcatagatggcgtgttcggaagaacagtttatccagacccggaacggatggtctatcacatttgtaggaacgctgatacggatggtaatatgcttcggagacaggcggtaaggagagtcctagtcggatgttgcatggtggagcaatggggccgcctcattcagaatattatgtggcgtatttgattccggcaacccgagcagttgttgaagtacttgttgaagtacttatttaagcagttgttagagcagttgttagagcagttgttgaagtagttgtcgttgaagcagtcgttgacgatgaagtagttaatgtgataaaagtgtgtagtctaacactaaccgtaactagttatagttagttagagggcggtaagctgagtcccggaaagtcaggcaggagggggggttccttgtcacaatcccctagtgttagagcacagctttcgatagaaaaagggaaccttccaatgccaagtgacttccaaacgtgaaagaccactgaggcaatccctagctatcttagttactaccaatgaaatgatcccatggatgatcgctgtactgtctttcatagcaagggctccattcccaaaatgacatatggtattttagataaatcaaattcaatgagtttccttaagaggccctccacagtatattatctatagcttaagttttatcttatagattgcatctcatactcctcctcttcctccactttcaacttttgcggttggcgaataatcagacattgcgagtgctggctatcctgcgagtccgactgccgggaaataggcatatcaacatcgtccccctcttctcggtttattgagcaggcatgagattggttggtcaatgcactattgctagttggtgtgaaatacgaattttggcccttgctgttcgtgacgccctgcccccatcctgtgttgaataaaataacaaacggcttcagacatggcacagtggaaaccataatgctgcagtggaggagaacggcggtcgcgattattgagtccgatagatgcagaggcgcgtcggtatggaaaagcgagcggttgagataggtttggcggagtataatcaaaatgataagcctaaacatctcagaaacatgattagccattgtagttcttaattgccttcatctttgtgatatcagaactcacggggccctcgtcccaaacgcaaaaaccacctcccacttttgcttccatcgcatctgaaccccccatactagtgaaacacacagtccaaaggcaagaatatcggtaatcacatcaaaaacagtgatgattttccaagaaatcgcctgatctcacttgtcagctgtgttgctctatgtgagcaagtataacgtacaaaattattacaatgttgggccatggtgaattggtatcgtggaaagcaactcagagcaacagcaataatcgaagcagacatccacaccgtcactatgcccagaagcatattggaatagagcaagtatctctttttctggcccagttgtttgagaagtaaacatatggaaatcttggccgcgccgtgcccagcaagaaataggaaattcgctgcataaacgccctgaatcgatatttgttagttcctttttcttcttttatttcatgcagctttgaaggacgagattggatgttcagggaagagggagggcgacttttccagcgcgtatcaagttcgacggagagctttggccctcaggtcggcctaaaccatgagaaactgcatccatgatgcttccgacgtgggcaatggccattatctagcaagtacccgatcagccttagagacatgtcgacagaatttaatgggtgatgagattgggaaaaaaagggagggttgaaggaggggaataatatagacttacacttccggtaaacactacgacatcatcaagcttaactggtccattgaccgcgagacgcatgtatagtcggaccaaactcactatgatcatccacgtcatgaacagtgtttcaacgatgacaatcaagccacttcgattcgtgacggagactgcatagggggagacggactccatgggggcgttcaagataggcgagatgccacgacgagaaagcagagatttcacgatgggtcatggttataacttttgagagatactggggccatatttgccgcgaatgaatccgatgattaaatgagcgacaggggtcctgatagacttgatatcttgtacatgcaatcatctcccgtaataagtgtttgtgatgcatattcgaacgctatataaatcattttacttattttaaagagcagctggtcacagcgaattaattaatttaagatttaataaattacagcatatcttagcctttcagacccgaactcgattctcgagaaaagtctgatctcaagtaattatcgctctcccagtgagattagtatgcaaaggatatatatagtaatgggttaatgggttgatctgaattcagaaaaactagtatgtaaagatctaaactaggtaataaaaaataatgtattcagcacaaagtacggagtactccgtacagcctggacccatgtagttgcgaaaattagcaccagtttggtggaccttacggaacgcacagtgccaatctcggaggaagtgcaggttagtataacgatgcaccctatcagatgatcctaatatagtgcatatatataacgtagctgggattgttattctgaatggggccagatttcggcgggacggctggaggcagaccgcgggtggtacttgtgcttaaatgccccacccaagcccgaaggaagaaagattttctctttgaactaattaatcacgcaaaagagcttagtttacggagtacctctagtacaaatacagctcgtgggtcggggtggagtatgtactatgttgtatatggtgtttgaccgtgccctaatgcatcgtacttcggccgctgccaaccacaacccttgcttgttgaccagggttcgcaagatacaatatagaaaatattattactatgctagcttttttcacgtctcattatctacccctgcacgtacgttgtattaatttatttttctaaccgaaaagcactactacattctcgccttagttgcactatcattgaaaccgtattctcaattcctttatctactttctggagctctttctttcctccattttactgatatattcttcagatccggttcatttattccccccccctcattaatccgccatggggcgcgagaacggaatcatgttgaaagttcaacactccacgccggagacctcctccctggacctcccctcccagaaggcaggcacagtgcaggacaaacaagacatgtggcgagccgggcgagatcaggaactaaacgtaggtaactttattcaacctttttgagtcctcctttccaaatcaccaaaatcagagaaaaagaagaatgaaaaaaaatgacacgtcctgcagagaaatttccggtttctttcggttcttgggtttacggctgtacttatgtgcacatgggaagcagttctcttgtaggtctctctcggtaaattgatcaatgccttgactaggataaccgacttcatatattggatctgtgctgacctattgaataagtggttcatcttatgggttgactaatggtggcaaagggggtatgatctatacttatctcgggggtctggcagggttcagctttgtgattctctcaatggctgaaatggcttccatgtatgcatatcacaatacatgtcttggcgatgagattgctaacctttatttcctctctagggccccattgtccggcggccagtatcattgggtatcagaattcgcaccccctagttcccaggccctattaagttacatcactgggtggatttgcgtgttgggttggcacaccggtatcgcaggatgctgctatacagtcgccaacatgatggtcggtgtggttgccataaattaccctgacacgtatacctatgagccatggcatgtcacacttctagtcattgcggtagccctggtagccttgatgtttaacacattcctggcccagaagctccccttgatcgaaggtattatcctgattgtgcattgcttcggtttctttggaatcttgatcccactttgggtgttgtcccccaaagttcctgcctccgaggtattcggttcaatagaggaccggggtggttggggtaacaacggactctcctgtatggcggggctggttggtcccatctatgcattgattggtatgtccgcgcgctgatggatcctattttggctattgctaacgacatatgcggagaaggccccgactcagcggttcatatgggtatgtatcctgttattccccgatctatgtggggaaataactaataccagaatgcagcggaggaaattcgagatgcatcccgggtgctccccatgggcatggtctggacattgatcctcaacggatccaccggcttagtgatgataatcacatttgcgttctgtgtgggcgacattgatgcagtgcttgagtctgaaacaggctttccattcatccaggtcttcctcaatgccacaggatcagttagcgccgcaacaggcatgacagtagtgatcatgaccatgcaattttgcgcggcaatcagtaatgtcgctacaacctcccggcagatctactcttttgctcgagacaagggtcttcctttttccaatttcttggcacaggtgagttctccgacacggcccccatccattgctctaactaaaatgggggacaacaggttaacccaaccttcaccgttccactgaatgccctttgcgtcagtctcgttatcgtctctctcctctccctaatcaacattgggtcttctgtggctttcaatgctattatgtccctcggaacagctgcccttctgtcctcctacataatttccatcacttgcgttcgtcttcgacgctggcgcaaccagcccctaccaccggcacgttggagcatgggaaagttcacccccatatgtgacaccatttccatcatggtgttgctagtgatatggatctttagtttcttccccttgactaaggatgtggacccgactactatgaattggagtgtggccatctttgggggtgttgttgcggcatcactcggttattatgtgatttacgcccggagagtctacaaaggtccagtgatacgggtgaggatgttgcagcgatgattagtcatcaagtggcttcctggtcacgtgccaccaaaaggcggtgtggatatgaccgccctggccctcggcagaatccccatcgaaaggcctgagccaactggagatcgacctgattgagccatcggccgattgacagttcagtatggagcaatcatgtatccacttagaaatctagcaattccttgttttctgccgctctgccgtctgttaaaaactaggctgtcctgtcctgatgaaaatcatcagaattccctacctacatacatctcatgtcaccgccagagccgcaagctggactacccaagttcaaactagcacaagagagggaactatacaagtatgtatgtgggcaggtttccactatccccgagtgtgccggatcgcaaactaagactctatattaaaaaaaagatatcttaaacccaacgaagttttccaacctggcccaggcacgagatatgaggatgcacagaatcaacgtactacatatattccccgcttatcgccagacacagctttgacggccttcgcccaattaggagttttaaggttcaaagctcaacgcgccttgatctcactcttcggtcgggaccaacattacatcctcgcagaggccactcaaacccttactcttcaagatcatacagtggaaaatgatcgagatgccttgtggttgggttgctgcgttgtccccaagggggatggaatctgtcaacaagtcgcttccctaccgcaactcaaaccagaggataaacacgtggtagagggtatatacgtggtacctgatctgcgcgaggatgatcggtttaaccaattggacatggtcatcggctctcccaaagcaaggttctacgcaggcgcccccataatcagtcctaaagggatcaccatcggatcctactgtattatcgatgacgagccacgatccggattggacgccccgttggtaaagttcctacaaaatatggcatcgaccgtcatggagcacttggacatggcccgatccacaacggaacatcatcgtgcagagagaatgattgtgggactcggaagttttatggaaggtaaggcgacgctgcgcaatgagtgggtacaggacactggactacgcctgaatgaacagcaacataacgaaggccacctgaatatactgcagcaaaatgtacaaatcaaatctggtcttctcacaaccgtccatactcgcccgtcatcctcgccgctgcagccaaaattatcttcacagaatggttctgagcaatttatatcatcctcatccaatttgtccagtgtaccatcgcagagcctctcctcaggaccatcttcctcgtcgtcaacgaccctgtctgacaaggattcaaacgccagttttgaccagacgtcaagtctcaacaaatccgaaacacaaagtagtttctccgttcgaagcacgtcgaccgagaatctacaagctgacatgctgtctgtcggagttcgacaagtattttcacgagcagctaacatcatccgcgagtcgattgaagtcgaaggcgtcgctttcttcgatgccagcatcggatcatatggtggtctcgtcaacgatacgaagcgaaaggggccaggctccgacagcggtaccttggaaagctccatggacagcagcgatgatagcaccgaatctgattctcagaaaagctctaccgcattcgggaaggacagcacaccagagaatacgaccttgtgtgaaatcctaggcttctcgacttccactacatccagcatcaacgacgaatcaaaaggaagacttgccctccgggaagtattgttgaagacgcttctgcggcgttacccgcatggcaaaattttcaatttcagtgaagaaggatcgatgtcctcggacgaaagcagtgatggaccctgtaatagctcgttagaccgtgagagttcaaagacggccaacatcgacctcactggtaaaagaggaacaggaagtcggaaaaagacgcgcagtgccacgctcaaagaggacggaattgttctcattcgactcttcccgggagctcgcagtatcgctctccttccgatgtgggattcccaccgagctcgatggttctcgggtgctctggtgtggacgaacacacctcgacgcgtcttcacatctgagactgagctcacctatctgtcagcctttggaaatagtatcatggcggaggtgcatcgtctggatgtcgaaatgtcggagaaggcgaaaacaaatttggtcagcagtatctcacacgagttacgaagccctctccatggcattcttggtacgtcagaaatactccgagacacggcgatggacgcgcttcagcacggattagtacacacgattgaatcgtgtgggcggacattgctggacacgatcaatcacttgctggacttttcgaagataaacaatttccggaaggaaggaggtaacaaagccctccacggacggaaaatccatcttaaacgacacaaaaacacagacccatcgccttacagtaagcctccacgacggacacgacatagtggcatgatcagtttgaagtctgatattcagctggattccgtcctggaagaggtaatggaaagtgtcttcgcaggctacagtttctaccacagttcacaaaggtcaacgacgatagaccgtccgaatcccatagaacttgacgtattagggtcctcccagcaagcgagtcaggttagcatcatcctggatatcgacgaagctgctgaatggagattctccacccaaataggcgcctggcgccgcatcatgatgaacattttcggcaactccctgaagtacaccaaggctggctttatattagtgaagttaacgtcatcacctgtcactcatgccaaagacgccgtgcccggaggaccttctgatttcaaggtgaccctgctggtcaaggacacgggtatcgggatgagtatggagtatctgcaaaataatctattcacgccattcacacaagaagactcgcttgcccccggaaacggactcgggctcagcattgttcaccatgcggttctgtccatgggtggtcagatcgaagtcagttcactccggggtcgtggtactgaagtctcgattgaagtcattcttacccacgtacccattcaaaatgccaacttgagtccctccaaacctgagctcattttaagaatcaaagactttacacgtggcacgaccctaggacttctggagctgggatcatctgacatccacgatcgcgatacaattctctctacctctttagaaaaattgtgcaagaactggttcgagatggatgtccatatcctgactccgtcggacacttctcccccctcatgcgacttttatgttgcggtgcagaccgataccgactcggtgaatacctgggaatcgtggttgtcaaaaactcgagatggcaatattaggagtcgaatgatttcaattgtggtgatttgtcagtcgccagaggcagcacatctcatgtctgttgcggcaaaccaatcgaaccacgaggctatcgtcgaatttatcagccagccctgtggcccgcgaaagttggccaaggcatttaacatttgcatcaagcgacaacaaggtcaggaatttccgattgggaatgactctgatatagatcaacctcaagagaagaatgtgtttcagttgacgaagtcacctctggtttccagggaggatatcgacgcacaacgtgctagagatgagatggatttccaaaagcatcaggcaggaaaacaggcgatagatgatgaatatcgcaagttggagggaatgggagactcatggcaacataatgacgctcctcttcctcacactgaaagtgatgccattactttgccaattcgacagggattgtccaggaaagaggagccgacgttgacagtcttgttggttgaagacaatgatatcaatctgcagatattggtcgcacatatgaagaaagaaggatacaggtacacaattgcccgcaatggtttggaggcgtcgaacgctttcaaagcccatcctggaaagttcggagtggtcctaatgggttagttcgtctccttgttctaaataaaggactgttctgacaagcacagatatctccatgcctgtaatggacggattcgaatctgctcgccttattcgcaaggctgagcaggaataccagaacacgctcgatatttcagcaaaaggatcatttagacctgcgactattgtcgctatgaccggccttgcaagtgctagtgctcaacatgaagcttatgggtcaggaatggacctctttttaacgaaaccaatcaaacgaaaagatttattcgcggtattgaaggagagaggcccaggcgaggccagaaatccctctcaatgatataacacattaatgacggtcatgtttcatctttgatgtcaagtatatatacgattttacttgttttgtgtttgttcttcttcccaatctaccattttgtcaagattaaagattagcactaatcgttagggtacaaaggtcgttttcaccatgtcagggcctatttagaccgcttttaggcatctgacttagtgggctttcgggtgtaggtatcgtaaattatgacagcacggaataaccaggcctgatgaccctgggcaaaagaagcttttggcaccatacaaatttaattatttccatttttctaagtgtcttgtaagaaaacaagtaagatttaatgaaccaatcataggaattggagtaaaccatttagaaaatggagataataatttgtatggcgccagaagcttcttttgccaaggctctctctgtaatggtaattcacgtatccttagttatttttttttctgccaggccaaattcagacattaaggcctcattatggtgaaaacgaccttgcgcgctatgcccgccccttcgtaattggggattctggcgggtgtgcatagcgaccttgtctctattggctattaggattcgattcatccgccttaatttctgtccttcctgatgagaagttgttctatatctatattgaggtagtcagaatagtcggccgctattacggcctctatacttaacatcgcgcgtaaggatctggccggctgcaaaagtctggcccaccttgccacgaagcaaaacagtgtgtttttggaggtgtgctaagccttgggaagatagcacagaaccgcaccaatcggaagcaagcccatgaccccggagatccgtaggaccttagggcggggatttggcggacttgacgacctgtgtttttttgtcgcctatatcctctctctccgcattgaccctcgtgtcgagctcagcttccaactttcggttccaattccctgggactggaatcgaaacatttggggatcagcttgatggagagattccctctctttttttcgcattttactcttctctgtcgctattctctgtatgttgcgattgtacagaatagaaattcgccaataagtagcccctcgagctagataggatatggctacacgtattacgccatatctaactatcatgataggtgttaggcttgcagtctgttttggccgagcagattggtcaatactgaccctttgcatacgcttccccaccattcaagcctcctatttcacttgggggtcatggctagaggggctagtctcatacaatatgagtcgtagacccttgaatggacttattatggctattcggctgctggtagttatattcggtgggaatttatttgtcatgatagcctgtcgtagtatccctgagacctatccatgtaccactagcaaggatctgtactatttaggcaggagttgataagcctaccgcttcttttttattcctcttcttcatcctctcacattatgagcggcacatcttgaacactactgtttctttcttaccttcaggcctagagataatggatggtcagcaagatgctaaggctgccattgaagccttgcagcgaaggagacttcaaaaccgtatttctcagagaaaccgtcgtaagccatcaatatcgctaccttcaagtcccgtgtgaactcggattccctaattctatgcaccccaaggcaaacgacaagcagaacttcagcaacagcgactgaaggagctagaaaaacaaacgaaagggagccaacggcaaaagaatggcaatacatgtcctcctgaaagtaataatcacgactgccagatgtgcaacttggatggaaactcccagtttgaggggaagataccagctcctgtctgttttgaagaagacataccccaatctgaaggtgtggattgcgagggttacactaacattcagctcgccaagttgccagggcgaaataagagccccagcattacaagttccattcagagactaaatgatctgatgccatgatggaagaaatgccgaaatttgtactggaccacgagcccggggtttgctctttatctgatcactttggggcctcaaaagatctagagacacatcagaaacaggcaccagaagagattctgcaatattccagacagtctcaacagcaaaaatccactgtgagccgaagctctcccgtggggatggccctatacactgaaaggatgactggaaccaatgtatctacgccgacgctgccattggaggcccccgagagcctacgaagcgttatattgccgaggacaaaggtaaaatggcactacacatcagcgtcgagcgtggtaatttggcgattgtgcgtttcctgctactatatggggttgacgttaataggagggactactctgggcggacagcactgcactacacagcacacggcgcacatcaaaattgttgcagaattactcatcgcgggcgcggacccagaagctcgtgataacgagggtagaagcccgctacatgccgcggctgatgctgagtgtgagccaataatacggttgctagtgcgagagggtgcagacctaaatgcagccataggaattagcggtattagcagtagcgaggagggggatatgcctttttcatggtggattgagccgatggatgcatgttcataattatatgaaacgagcttttttcaaatacaagaacagtgagattatgatttgcctttgattcaaagtcacgattcaacttatcttaaactaaatagaccaacgatgaaagcttaagtagtgcaatgacaaaggttgacttcgtccagttcatgtagcaaatttcgtatcgggtcagcactccctatgcagtattgcgtgctcgggagagtagggtgtagggtgtattctcaatccagtacttttcccttactgcgatgtaacataacggaatttaggtacctgaagtatcgaattggggaccgggctttcggtttagttagatcaatggaatttatcgctagggggccctgattttgtgatatgcattcataaaaccaccaaaaatagattcgtttgaacaaaacaaagacggcaaacacctcatataaatctgagagataatcaagagttgttgtaaagtaatacatatatataccaaggactgcattctcatttctggagcattgctataatttacatttttgttgctcagtgtaatatcaaatggaccgacaataaaccatccaaacaattgcaatagtgaaatagcatcaaattttagctactattccaagtgagagatttgacagtccatggttcgaattcaaatatccctgcccattacgtacgtatacataggaggttatcataatgcatccctttgttgaagacatgtcatgtcatagtacattatgtgttttttgggtagagacgagcaatgtcttcgggtacacagtatctgcccctcacagttccagagactgtcaaaacttttacaccgacgtggcgcgtcaatgggtttccaccttcctagcccagatcccgaaacggggttattcacatcccgctggaacaatactggtgtcacatcggccatgcacttcaccatattcatcagcatcatgttacagtgacgggcgtgaatcttcatgaagtcttctgtcctgttcagtattgtacggaagtcccactcattccgatgtgcgaagagccacaagacaccaacacagtgaacctgatgcattactggttcaaacttagcttcgggcctgttacaagcaggccgaaacggtggctaataaagggttggctggtacttgccttcagacatggcgatgacttcgttgtctcgtggcggaggcagactccaccattcatgggtctcggttgacttgttgatcaagcttagtttctcatatggaaagctaaatcgcccggctgtattcaagctctagtgtcagagattttcaaacatgcaaggccacgatggcttactcttccaaagatcgtcccatgcatcccgacgatcctgggtaggtaatccaataaattcatgagatattagatctgagttgtattgtccccattcatattccaaaaaatctgcttcggggccttgtattgtcagttggattttgccatagctgggagatgggaacctctcttactgaatgcccacattcgccgttgacacgatgcatccgttgccgcgaaataatagcaaatcgtataaaacagcaaactgatgataaaaacagaaaagcatagaaaaaacaccgtagatggacgtatggagaagcccgcaagcttgctaatattttttgtttcactctccctatacttcaaactttcctcgagcagtggaaaatctgcgtcttcttcgtttgtatctgcaggattcacattgccattcgtaatttgctcgttcgcccgctctagcctctcgtagccagatattgtgagatgagagccggtgggttcagttaatggcaatgcagcaaaagactttatagttgccttcgatcatcgtaaacaagagttgataaacttcaacaaaattagagatttctcaatgtaataatgctttcatctaaaacttagatacccagcaacccaggatctcattttcagcattctgtcagctgaggcctagtgcggtcatccacggtaagcatttggattatggccatgtcagcacacaatatgcaagttttctaactactgcaatattcggcttcagattatagtgctttgcacaaatcggactgtggttcctcttccatgaatcaatgaccaccaggccttgtacattgttattcaagtgggtaggccttccgtatcgctctttatcaatactaaaatcctctcattagagtcacgtcatacactacctaggtatggctgaccgattcaaggaaaaggctagggtgcctttgctttattctatttctgcggccttggccttcgccgtacccgtgatcgtgtttcaagcttttcaaattgagccaagtgatgcaagatgtgatcgtctgacttatccctggtctcctgcactggatatggttgaataatactgggagacctttgagaaccatcagtttgctattaaaacctcgtatttcgggttcgaggcaacggatcaactagaggatatatggaatgaactacttccaggtatgccgaatgagattatttggccctctttctgcttttcttgctgtcaaatatagaaggagaccaaaaatatgagagctgaggactaaattcgatacagagcaccctataacgataccgtcttctcgggttgagagccttggtcatggaaattctgcagatgacccagactggattcgggatccacacgacaccagtaatctcctggcattgcctgaatacgctgtacagctcggctgtttgaattttctccgccaggtgggctaccgatccgatcgtgatttcacatacttgaaatcgttccaaggtgatgactctcttgtctgggcccgagcatatcagtgcatagagcgattacgacacgccatcatgaatttcgattgaattggcttattattggaattagcttactgatatctttgaaagtgctggggtgacgttggtgccgttacactattataatggtaatacaacaacggaagaagggttgtttagggacgtgtcatttgattttggaacactgcatcgttgtcgaaactttgaaacatagacgaatggattagagagaacggcgtcgtgagcgtcaccatgaataatctatggtggggaggaggcaatgtggtctaacagatgctcacactgatcacgcacttttttctgacagtacaatttaaaacatttaaaactatacttgtagtaattatcgccctataaagatcgtgtattatacaaacggaaccctaagcagccagagtaccatatggctgcgcttttattattgaaacaacgtaatcaagttgatccagtgttatctgcctcgtatctctcgatggaaatgatcagactgcaagaagtgtagtcaattaatagcattgcaagctaacagagaatttgaggaaaaagaacaaatagagaggggagggagaattcttcagcccacgagcaagcaagtagtatctaacccgagtaatgaggcgcaagagagccccatgatccagcctctaacaatatttctaaatctcgagcttcaggtcagccaacatttccttattcagcctcacctcctctttctggtaaatgcaaaacttgctttcacccatgccatcaacaagttcacgaatattggcaattaaggcctcagcctcggatcgtcgtgaaggaccctggccccatagagctcttgtgataatcccccgagtgttgatagcttgcggagaggttttgccgaggtgtggacaagcatccatccactcacaaaccggccgcgcaatttcctccgcttccctatatttcccagccttgacaaagtactccgctagcatatgaagagggacaacgttcgactcgtccggctttctctccactagcatgcggacagtttcctcggcctgcgggaggttcaattcattctcgagtgtgtatattccttgccatagcccataccaccgtttgtaatcgacatcatagagtgactgaggtggcgagattgccgtttcttcgtttgccagcttatttcgaagtagttgaaggagaagctgaagctttttttgctggtctgcggtattgtcggagtctattaccactgggtcgatggctagctgttccagttcggcatctgaaaagttgcccagaaaactccgggcagtgccgtagctgaaactgtcccagaagcgattgaccggtacaggtgcctcccatgaaaatgactcggccgcctcagcggtggcgatctcaccggttgagtaccgggaagatgaaacgactgtcatcctcgagatgaaagcaaagtgatgttaagagaagagtttgttcgaaggtatcggctgaaggtaaagatgactgaatcttggaaatggcgttttagcgttttattccagttatggggagcggtcagaggtgagggaagggcagcttactgtcagacaacaaagaaacgcatcgctagtatccctaaactggctaatgataaggagacaaaaatgtgaaattgtgtgctgatagacgcaatgagaaaaagattaagccaattctttctctctcgtattatttattttcatacatgacagagagagaaaaatggagatctgtagattgatttggcgccaaaagcttcatttgaaccaccctagaatgtggtgaatttatatggtgctaagcttgattttcatacatggcaagaggtcatcggacctggttattccgtgccggcataatgtacaggcataatgtacaattcggaggcaatgtacatagttaaccgtcaaacttcaggccaaatgttaggcattaaggccttaataatggtaacaaccctgggtagatgaaggaaagtgggaactaaagtattgaaattcataaggcacacatggactcttggagggccttgggcgtctaaccctactggtgctactgatgtcaagccttcgtagtacgttgtgcttcgacaaccttcgacaaccttcgatgcgcaataaccagtgccttacaacgccagcagaactagggtaccttgattccataatgaagccatgtgtaatggctgtactattcccatacctcccgaggtaactacaggcagcctaagcacaaaccacaacagtattcttttccacgattttttggaaacgaagatgatatgattattgcaaagacccgagaacaagcgttgattacatggaaagtaaaaagtccgaattttcaaaggcaccattttcccccacttcaagactcctcgagatctaaaaccctaaattaatagactaattaggcattactagtaataagtggagctaatggcagcatacttgcaagtgtgtagatgacatcgcagctagtgtgctgacgccaggctgacatgcacccatatctgcctaatatctatggcaaatgaattcatgcgtcttacacttgatagttcagccaggactggtctggctcagtggtaaatcgtagccatcttctctctcggaactctcaaatgcaattgtacaagctgcaattctcgaaataatttctcccttgaggcgaaccatggggctttctaccatttctccactcgctaggtatctttccctcgggggctcccccagagaattgcgacaatcaaattctcatgggggtggcgatgatcgttggataacactgcgaggcggtatagtctggcagagaccatccatgcgggttcatgctctggggccatgtggatcgtttcccacttgccgtacagccagcattggacccacgacgagaacgaccctcattgagccccagaccacagatggatcccctggggatctgaggtcaggattgctgtggcatcacgtaatatcgctaaccgtccatagatgggtgagtatatagatcttcggacgcctattccaagcttctctattcttaacgcacataaggggcaccctggcaaaaaggggggtcttgagtgtagaaggtcaacctctagaaattattgatccgcagtacaggaggttaccgtctgcatgattgtctcttctgtgactatctgttatttatgtttgctagatagattgttttaagtgagatgttcgaggtttgcaacgtttgcaaagagtcagctatatcaacaggctctcatttgcaacttgcttcttctttctttctttatcttcgttgtctactctctattgttgatcgatctggcgcctcaggggagtggtgctagtactgatataccatacttacaataccataccatgtttcgtgcatttgaagacaccggtctaactacttctgtgtatgcgtaatctaaaaccagacatccgtccatactcgactgttacagactgttttcttgcctctcaaccctcagcatgaacaccacaccggaacagatccttgacgtcgaagatgctctcgtttcagacaagaatccagcgcgcgatgaagatacacttgattttcaacgctgcgccagattgcacaactacctggtcgcatatgcctacatggcgcgtaatggaaccaatacgcctgatctcgacgccctagccagggagtcatggttcttcaaccagccgatcgagaatattgacgccattcgcgctcggcttgatccatcattaaactcatttcttgattcaatctatgatccgacgccgggattcttctactgggtgagcaggcttcgaatgagacttgccgacgagtctttccccctcgaagatagcgatttcgaggataaagagcggtttgtgatcatttacgacacaactcccgatctaggctcccattgtcttggtgttctctacgaccagctgaaccatcgtgcctcgttcccattgactatcgagaattcagaaagtatcgagcctgttgctgaacattgggatatgtggttccccctagagacgattcttacccaatggatctatatgctccgaatgggaaagatcacggccgatccacggaaagagagagacttatcccatgaagaagttaattcgcgacatcagattggattatggtgttggcacccatactgcgctgctcaaattgatagtacggttgctgcgatggaccgctacacggacgcgatcgaatcacggatgcagtcacttttgccaatatcccgagatacaccattttttaccgatacagacctcgatacggctttagtgccaaaggagtgctttattcgctcttttctgacccgagtgaggaccccacgtttcaagctaatcgcgccgggcctggaggttccgcacgataaagaagccttcacagcgcgtcagattttcaacgcggaaggccagggcagggatgtaccgtcattcctcctctttgcatctgcggatgataggcgcacgatcagtttcaacgaagaaatttatcgtctgttctttggatcgagaaatgatacaccattcaatgaaggtgatcctgttcccacaggattatatagtgcaacggtcaatcgattcgaatacgattctgaagagactggattccaccttttactcccattcacactacgaccgaatcttgccgacgaggacggagctaggcggagtgatggaactctagtgccatctggctcatccacgcagcttttccagcatggcgtttttcacccatttggcggagagcaccgggctcaaagattggagagactatttgatcgatggactgaattgatcgaaagtggcgtgtggacagtgggcgaaaatggcgttgagggagggatcgatatattccgggatgcagatcatggcgcctgggaggattactggattcccccatcctggtaacagtataaccgcacgaatcgacgagatagcgtccgcgtctgtgatttagtgtatggagaggcaaggggcatagtaaacagaagtaagaataaagtcatattgaagaatcaggtgtctggtggtttcctcccttgcaacctacgagttaatacgaaacaacaaaactaaacgcttgtccttagtgtgactttgagggaattgcaagcagtcattcccctacgctcttgaggctttgaaaccctgcttgcaagcatcggcatatatatgtcaagtccatcaccagataaccacacttgactcaaatgactctattcacatcttgatctaggtaatatacgaagtcaaatcggccggaagcctcttagtattcagttacatcgctttgttaacttatctaattcggaaacgtaatattaatcaagcgtgagccgtgaagggggacgagacggctctgctggggaatttcgcgcgggtatggaatatgactcttgtgcatggccatttttcgattggttgatggctttgaagcctcggtcgaagttcttgatgcaaataatggcgcataaaatggttgcagaagtcagcaccacagataccgatgcaaagaataacattatgtccttcccggctgtgacagccccgcagagaatgatgatgcggctgatgagatacacgagtaggccgaggtagcatgtcttgcaaaggttcagcggtagttcctcgtagaggcctgacagggtaggaagcaagggagctcacaatgataccaacaacgccaatggttcgctcgtgctggacaagccaaataccaagtagcatgacgatgaatgaggccggaatgaggaacattgtgagagtatactccggttccttaaagtggacatacaccaggttgtattggatgatgaagcccagcaggaagtaaaagaggagttttatcaggaccaagaagatctgtgctcatcttttgttagttcaaaggccagtgaagccgtgggtggtggaaatcacctcgtagaatagatagcgtattcgtgttttcaagctgccatgaacagacttgtagatgacccatgaatactccctatgcaaatagtatacaacgaagcacaggatcagggtgcaaaatccagtaattattgacactacaatctccgcaggctgaatctggggccagaggttgcgagtggtatccaccagagttggaaacccatagcgctggtcaaacagttgcgtgatagctcctctcatgtaaatgtactgcataatagagtacgcaaaactgcaggcatcgcagacgcagattgaaaagagaagaacattatttttgttatggatcgcatccagggcgaggatgaactcgtagaccgaggcgaatatgaaaacgcctaggttgattgggaccatgtaggctactggaacctgagtgatggtaggggtaacccatagctgccattccacgagtatatagctaggtttctggttagggtggctcgggcgaagatagggactcaggagagcatacgtcttaagggcaatagtcaggatagcctgcgtgaataacacgatacacaaccaccattcatttcttatggttggtctatacatatcaggttgcttttcttctctctcgctggatcattgaatatggaaataaatattttattttgatcttcgactatttttttctctacctccacgtgatgtcttctatgcagtgagtgtcaaaccaatgggaatcattgcggcaaagtgttaaccttcttcggtgcgactgacgcagatctttcattagtacggagtagttgtggatctctcgtacggagcatttttatggtataatacctacaacatatccattgttcatgtatttaaggagatgccaaatccgaatccaaatacatatacagttggctccaatattttcaggataccagtctttttgaatattacccccttttagtgctctacgtacacaaacagtgggacctctgaaatattgggccaaatattgcccagatgcacgtatccacatatactacggagtaccgttggcccaatatttcagggatcccatagtttatgtggtttatgtgcggtgaaaagtacttcttacaaaccgttttcaatacatacaacatttatcatacgacagatggacatgtgagatataagttatacttaaaaggttcagttctgccaattgaaaccctgggcaacgtgaaatcttggaatatatatctgaaatatcacccgaatcctatatcattactaaagaatcgaaccaattcacttagattggaaactaaactataccatgtataaaaacggtagttccgggcaaagttgttgatttagtaccgcatggatctaaggaaaggaaaaaaaaaagaagtggacgggcagcgattcgaacgctggacttttcgcatgcaaagcgaacactctaccaactgagttacgcgcccatttgatgtaaatcctgaggaactttggttatacattgcaaaagcaaataagctaaatttggctttatgctgtgagtccgaagtatcttgacttgactgttctagttcgacggagtttgggtagaaaaatttcttctatctgagtcgttattaaataatgagcaggaatattctgcgcggtaaagctgtggcctagtagaataggcagtgagagggaatccgacatgatgaaggttgtacatcgaagatatcgaaagtgatatcatctatgattacatccatggatgtacttcgcccgattatgtagacgccgataacaaattaggatcggaagttctatacttaaaatgataacttttttttacgaagactatctcctctttctcccttttctttctataacttcttggatctatctcaacgctacccagataatgccgttcgctttgatccgccagccattcaaaaagggcttggtatttctagccacaaactggcgcctccacgttaacgtttcactatgacctatgattatgatgcactattatgatgtggacgaagaataacgcgcttggaaagaaatgctgttatgtccaaggaaaccaaatagaagccactttagagagttggccagaggatactgacgaaaatagctgaggtggcttggatggggaatctggtgattttctttacttttggttttgtcgaataacactaatatatgataacttgaaacttgaataattgcattccggctattgggttctgatcgaaactcgggggttgttgcgctctctctcgctttaaatgagtaagagtaggactgatgacttgaatatccatgtttgtttgcccagtttctgctatactgaacaatgaacaatctacaataatccgtattatattatcatcgagtgctaatatagatggagctatcctctcctgtctatagcccctaattcagtgtaaatagtgagttatcgttatccttactcttctgtcaggctaaattcaaggattaaggcctagaaaaagcagctggccgctctgcaaatggtaagaaagcaaacaagacaaatataaacatcacgatgatccatagacaattgtgtagttcgtatgctgtatgtccacgaaatgctcgacaggaataaagacacttcactacaatctatttcactacaatctaccttacagtttaccgtctcagacataaaatagaaagatgccagttcttattatagaactaataaaaatgaaaagataaaaaacatcacagagggtcgtatcccatttcccatttcccgtaagacttaaaaattagcaaaaacgcaagaaggggccgaattgatctaatcaacctcctccatggtgctctcgccggtagcctcggcgggagcagcaacctcggcagcaggagcagcctcgtcctcgtcgatgttcagaccaagggagacgagcttgtgaatgcgctcggcgaagctggcgggctcctcgatggtgaagccggagaccagcagggaggtctcgaagagcagctgggtgatggacttgacggtgcggtcgttctcgccatcggcgtcaaccttcttcttaagctccttgataatgggagacttgggggagatctcgaaagtcttcttggaagacatgtaagaggacatggaggtgtcgcgaagggcctgggccttcatgatacgctccatgttggcagaccaaccgaactggccagtacggatggcgcaaggggagccaaccagcttggaggagacaacaaccttctcgaccttgtcgccgagaacgttcttgagggccttggcaagaccctcgaactccttctcctcagcctcgcgctcggtcttctcctcctcggtctcctcgagctcgaagtccttagtgatgtcgacgagcttcttgccgtcgtactccttcagctgggtgaaggcgtactcatcaatggggtcaaccaggaacagaacctcgaagttcttctgcttgagggtgtccaagaagggagagttggcaacggccttgagggactcgccggtgatgtagtacatgttcttctggtgctcgggcatgcgagtgatgtagtccgcgagggaggtcatctcatcgccggacttggtggactggtagcgcagaagcttggccagaatggggcggttctgggcgtcctcgtggataccgagcttgatgttcttgctgaaggcggcgtagaacttgtcgaacatctcgcggtcctcggaaatctcgacgaacagctcaagggtcttcttaacgatgttcttacggatgaccttcataatcttgttctgctggagagtctcacgggacaggttgaggggaagatcctcggagtcaacgacaccccggatgaagctgagccactcggggataaggtctgtgcaatcgtcggtgatgaagacacggcgaacatagagtttgatgttgttcttggtcttcttggtctcgaacaggtcgaagggagcgcgcttgggaacgaagagaatagcgcggaactcaagctgaccctcaacggagaagtgcttgacagcgaggtggtcctcccagtcgttggagagggacttgtagaaggaggcgtactcctcattggtgatatcggcggggttgcgggtccagatgggcttggtcttgttaagctcctcctcctcgaccttggactccttgatggtcttggtcttcttcttctcctttttctcctcctcatcatcgacctcctcgaccttgggcttcttctcctcatcctcctccttggtctcctcggcatcctcatcggggacctcggtctcggtctccttaaggacgtgaaggtagatggggtaggagatgaactcggagtgcttgcggacaacctccttgatgcgggcctcgttgaggtagtccaactgctcatccttcaagtgaaggataatcttggaaccacggccgagttgctcgccctcggtgtcctccttaagggtgaaagtgccaccggcggcggactcccagatgtactgctcgtcatcgttgtgcttggacacaaaggtgacacggtcagcgaccaggtaggcagagtagaaaccgacaccgaactggccgatcatggagatatcagcaccggcggacagagcctccatgaactgcttggtgccggagcgggcaattgttccaaggttgttgatgagatcctatgagagatgaatatgagtattggtggtcagatagagatggggaagagtgttttaggtaactcctgaggacaaacttacagccttggtcataccaataccggtatcgcggatggtgagggtcttgttcaccaagtcggggatgatgtcgatgcgcagatccttgttggaatcgagcttagagggatcggagagagcctcgtagcggatcttgtcgagagcatcggaggcattggagatcaactcacgaaggaaaatttccttgttagagtagacagtgttaatgatcagcgagagcagctgagagatctcagcctggaactcgaaggtctcagacatgatggcggattgtgattctgaaagagaggttgagttagaaatgatgaattgataggaattgagcagatgcagagtctgatcgagcagtgggggttggggggtgaagttgggtgaagttgggaagcggtgacggtgggaagaacaggaaggggatttatatcttacaagaaagcaaaataattagaaagaagctctgggggggatagtaaccaaagcaaaggggagagatgaggaaaaagagtagaagaggcgggccagttccttttgtgtctccaaaaaaatctggtggagagtttctacggcgatccagcaacttccatgtcgttcaggcaacgcctgcagctttctcgatgtcattctagactcttctgcttttcacttttgtttctttgtttagactaattactctaacttgcccggtttggcagctctcaccttcctttttgtctatatttttagctgagctgtgagtgcatctgaactctagaaccttccccggatgactcgtcgactcatcgactcatctcaccattaggtaagcactggttagagcgctggaggtcctcggaagtcaactttggcagtacattcgatacatttgatatatagcaacttggagattcattattccctaatccatatttagtaggctcatcattccatgatacagttgtaaccccccccttagaatatcccatttacacatcaccggaccctcatagccaaagaaatcaaaagaagcaaaatacaagaaagaccggtatggcgcaccaccgtaagaccctggagtttgctatgctagttaaaaaaagatgcgatataacgttttgcaaaagaagagcaaggaacagatcatggcagaagacaatgaaagaaaggaatatggtgcaggaaaaaaagaggatcatgaatgtcgaagacgagactcgatcccagcaaaaaaaaataaaaataaaaaaaaggaggttaaaacacaagtgcccagagggaaggaaaatagacgcaacttttccagccagcccggaccaaccaaccgctaatatgcactgtgacgggagaaaaggggaggcaatagtcacgtaacacatgtcattaggaagagacggggcaaaagaaaaaagagaatcaaaatcggagtatacagatcccgagaagatcatccgccgggaggattgctcacaggaatgcaagagtcgtgacaccgacgggaaagaagaacgtagaggatcatcaaaatcacataaggtgtttaagcagcttggggctggctagggcgacctttggcggcaacgttgccaccacggccacgaggagtgaaaccgccgcggccttcacgctggaagccaccacggccctggctgccggcgcggtcaccgcgaccacgacccgcaccaccaccacggccggcagggaaagcgttgctaccgtaagcgttaccacgtgggcggcgctcctcgacgaggatctgctcgctgccaatctggtgggggttggcagcaacggcagcggtataaccggcaggctcgttgaattcaacaaaggcacagttcttggggcggctgacatcgaagtacttcagcttgccgaaacgggccagggtctgcttaagcaggctggcatcaaccttgtcgttgacgttcttgatataggcgaggacggtctcctcaacacggggctgcgacttcttgtggccatcgccggccgtctgccagccggcttcggtggaaggggcctccggggaacgggcaacctccgcaggggcgggggtggcagcagcgggctgagcggtaggggcagcgggagcagcgggagcagcagacttgggagcagtaggaacagcaggggtaacctgagcagcaggagcagcctgggcagccgaagccttggcggcagcagcggccttagctgcgaaagaggtagtcgcaatgctagcccaggtcttaggagcagcgggagcggttgaggtctccttctcaggaacctcccccttctcggcaataggagagggctcaggggtggcgggctcctcgtcgttcaggttttcagcctcgacggcaagaaccgcagctggagccgcctcctcagcggggacaccgttagtctgaggagcggcctccttgggctcctcaacctgctcgttggcctcgacctcctcaagcttctcatcgacgtctgagagagttacttcatcaatcacctggtgctcctcagcgggaacctcggcaacagcctcaggagcttcagcagtaggcgcagccggggtgggctgctcgggttcttcttctggctcttcggccatgtaccggaagatgtcgttaagcacatagtagccgttgggctgctcggcgaggacgaaagtctgcacgaacttgcgggacggctcggagttgttcgagatctcaccaatgactgagaccaggatgttgtcgaaagacgcctgagaatcgacattcaggacgcgcactttgcactcctggaacttcaaggagctaagcttctcgttgatggcctatgggagtggggtgcgtggttaggcgatattcacattgaggaatcgaatctaactcaccttagtaccaacggtgacgggaaccgactcagcctcagtgccgaagaccaactgagagcggcgagagtagaacaagtgaagcttgtcggggttgcggctcatggtggtgtagaactgctcgacgaagtaccagcccacctcatccttggagatctcgttcttctgctggtcggtgggagtgacggtagtcggggtggaggactgcgcaggctggaagctggcagcagtgttcatagtgacagatgcatggttgtaagattcagggtaaccgtgctgagcagggtagttaccattgataggaacctgagtcatatcggccatggcgttgaattgaggggttttatgttcggtttcgggtggaaaataagatcaaaagtaaccgagcgcggcgaaaatgaaggtcgagactacaacggccgaagtgcttcttttatgaagaagaaagcgatgaacgttctaaaaatggaattgtcgtgtttccctcgcttgactgcatgttcattaatttcaaggtcttgacttgggcatgggagatcgggactcacgatgcgaaataaacgcagcaccaatgcaagcaattgaagaggatagaaggaaatcacgtaaagaaccaaaaaaaagcgaggcgctttgagattgcggaaaagcgggaagtataggtgaagtgagaaagagttctcggttctgatggcgcggagagggagatgtggagggtttgagagaaagatgagaaagatcgagaaaatgtgggtctaggaagatgaacagtgaggcgtggagagtcaggtagaaaatggggaaacaaaaaacgagatggaatgaagctgtgggaatttgccttcgaagaaaagaacttccttcacttcgactccgtgcgggtttcgcgtggccttggcgggtggccaccgcccggcagaattcatagtacagctttagtgtacaaagatatattattagggatttctatccatatagatggggtcgaggaaagttttcatgatgactcaagatacgtgacagtcagacagggaaaataagagaaaacaaaatgccagatccgagagttgatactcaaatcatgcgcatctcatcaagtcaaaacgccacaaactgatccgaaaaaaaagaaagaggggtatgataggacatgaaagggtgactgtaaaaaagaaacagcaatcataagagccgcgtcgatagaggctcggatgttgggacgaggaaaaaaaaagaagcagagataaggaacaagacacaagcgaacgatcagagatggccaactatgcagcgtacacagcatatggcaagccttatgtctcctaatgtaccgtcaccatcagggctaatcagttcgcacctcagtcttctcggagagaggcttgcgcatgacagcgtcttggctagtcatcctccgacctagagcgcgctcgaccttagccccgagagcgagtttgttcaggttgtccgacttctcctccgtggggacaaatcgctgcttattgagaggcttgctctcgaggcgaccgaaaccgtcatggaggtgatagatgtcagcgattctggggtcgccgttgagggtagtgctgtcggaggcagccagcgaggggcttccactgacagtggagaatcgctttgagtttcggttctgcagcagattagacttgcggggttctcaataaataaagcaaaggccctacagcggacagaacatgtggaggggaagagaaggggattcctaccgattgggccatgatgggacgctcagagtcgagagagggttggcgggccatttctggggggaatgatacggttataaagaggaggatttgcgccgaaagaggggcgggatttcaaatggtaggtataggaaggcctgaaatggaatgcagactgcaggattgggctattagcgggtgtattattgcctagtggctgggcgatcttgaatttccaagggatacatactcaatccgggtactccgtcaaaggggatgtgttggaatcaggtgcagaagtaccaatgcagtgcaagagtagaaatagagtcacagaaaggagaagacggggtggagtcaaagtggttaagtggtggggaaagacaaaatgtgtggcggaaaaggggaagggattttatggaaagatcgacgtaatcgtaagatgtgcagtaaagagtctgcaatgaaactccaaggtggatatgtgattatacaaataagaaatgacctcgggattcaatctcccttctctgatgtcaattaaaagctttaccgggaatattttgccacgtgctggccacgcgagccgatcatttcggcgggtacggagtactcagtgatatacactttgtttctactccgtatgaagattagtattgtatattgtaatatgagggtatcaggataagatgagaatgaaagacttggattacttgcgagtttctatctcctataacatatgtcgtattggcagcaagaggcaacatcttggtctctatctctgtatatagtatgtaccattttacaaagacaaagagctggcaacacagagccccaacagagccccttttacaacaggtaaccataataccacatgcaaaacccaaaaaaatgatgaaacaagcccgtttaccctaacagtccaactatctagtcttggcaaactatgcagatcacgaagcaccaggatgctttgagagtctatagttcgagaagtcttgaaagaagtcttgaactactacattaacaagtaataaatgtcaaacctatcagaattgttacatgaagttgacgtgaaagcaacgaacacacttatactccatcacacaccgcacagattctgccggatttacttccaatttcaaggtgcaaagccatctctgtcgatcctcattcaattcaatcaacagcgtcccgcagaaatggccaagccaaaatcctttctcagggagacaaagtcgaagaagaagtctgcctcaaaacaggtatgcagtagcaatataccccgcacagaacagcttggtcatgatctcatacattttgatataggtacctgtgactgcagatgattttcttgcaggtgtgtgtctgaaccccaataagccaataatatcaatggtcaaaaattaactattctccagccggcgtcgagctagaagaagccggcgagaaatggcgggccggagatgcggccaagtctatgcgcttctttatgcgggccatcaccaactatgacgaaggactacaaaaacatcccggcacatttgatttagcttacaacaagtatgtaaacaagccattattttgaattttgcatttttcaaatctcatccatgattgaagagtattggtttgggtttacctttactaacacacgacctagagcacgagtccaatatgaaatcacccagcaccccaaattagcagcccagttgccagcaccacagggggagatcttgcagattgcactgcagtcacaccgggatgcgttggccctggagcaggacaatgctgacgtgttgttcaattcgggccaggtgctgaccagcttggcggagttaatatctaacctgaagcatcccgacgaggagcagcagatgcaggcaggcacctatttgcaagaggcaatcgagctgttccagcggtgtctaatggtacaggagatgaagtacacggaaatgcaagaggagatcgaaatgatggaatccggggatgtgccaccggagccggaggctgtaccaccggccgcgggacagtccaaagccgagtccgcaggtgaggagcaagaacagtgggcgatgattgtggagcccgtcacgaagaatacgctagtggacactgcggtggcgcagctggagactttgaccactctgtgcaacttgttgacttctaaccccagtgcgggcggtgttggttgggtgcaagagtactcgtcggagctggtgcagtcgcgactgcctgcttatgccgaaggttcggacagacagtacgaggcggccttggcgcgggccaagttcatctgtgccttgaacgatttgctctaccgaggcggacacaccgatatccaaacctaccagcaagaggtcggacaggtctttggtccagagctggatgtatcagcggaccctgatggactgtgtagcaaagcagatgcgctcacatcgttgaaccaggcactttcggatatccccccaccagaggatgacgagatgtttgagaacgcggtagcattgcgttggaagtcgctttcaaccgctttggacgcattaacggctgctaccaagctcccggatgccgacaacctgtccaagattcaccttggtcgcggagacgtcgagatgcacagatggcgtcttggtcgagcaccctggaaccacgccacggcgaagcagaacggagctatgctcctgcgcaacgcccagacgtactaccgcggagcaacagctctggctcgccgcgacggagcggccgaggaagaacgcgatggaacgtgtaaggaggcgattgctgcggcgattgaaggccagaatacgaaactcgagcagctcaagtcaacggacctccaacaggtgatagtcgtggcccaggatatggtggaagacggtatggtcgacggcagggaactgagtgccctgatttcatcatgaagcggacagagaaacaatttccgcaatatgctcacagacccgggtgggcttttgcctcctcgtccatctggatcgcatcctggcgaatgtgatgttgtctgctaaattgcgtggccgctgtagcagcaccctcaatatccgaaacaaccaatccaagatgcgacaatagccgctcaatttccagcctctgcgcctgcacagtctgcgcaagctccgcgttttccgcatgagtagcctcgagtctggcgttgagggtcgactgcgcttcttgcaaataaggcgtaaggtgcgccctgtacagatcttcagcgccgagtgtatgcgcgctgtgtagtaaataaaattagaagccagaacaaaaaaacaaaacaaacatagtccgaataaacggcaaaacgccccaatgcattcaacatacactgttctctcttgaccctcagcaattcccccctcctgctccctcctagctctcgcatccccaacaagccgatcaagctcatttaaatgcgacaccgcgtccctttccgcgacaatatcatcaaactcagccttcgcattcgcttccagcttcgcgttcagttgccgccagacaccctccaagctagcaggaacatggcgcgcaggtgtcggaaaacagcctgcaaagttcgcatatgaattggcacggagtgtacgcgctagagcctgctcgaagacttggtttagacgtgaggcgcgcgggcctggggattgggggattggagctggcgggggaggggatggcgacgccgcgggcggttggtgggaatttgattcgaccatggtgggtatctctgctttcggggtagagtcgaagagtgagaagtaatggagagcatgcgggtatggcgagggttggcgtgcagaaggccgtttctccaggaatttggatctggggtgttggactctgttcaacgcgacacgccggtcacgtgtttctatagattgaattggtggcttcgtacgttacagcgatagtatttggaaaactttaattttcatactctgtgaaatgctacatagtatgcgattatatcaattctataaagtagtgcagcagatggtatacttggaagaaaattcagctaccgaccaactcctagccctaacttaatggatctaggcccaaccaactccggcgtctgttctcctcattctcggctttcaccaaaagagcaggactcgggctttgagagtctttccgtagattgaaagattgtatattcgtcgccgaacgggatatgcgccacgagcatacgcgtctatagaggtcagaccaaagtaatttgaatgcgggccatgagatagagacgtatataaggctgttccaaaatccctggaggggaaggacaaagctagatgcatagttcagactaaaattaaagttgttaggacgagccagggaatagactctgtttatcgttgaggggacctgcagtgtcgaacaatcaacacaaagaaccgacagcagtttttagattataatgggcttcaattagacctacccatgtaacaagcaatgcaatgaagaacagcatagcgtattttgtatatgcccacgttgctgaactagcttctgtggacgtcgacctccgctgtgagtctgccccatccggccgcccagtcttgccaaaattctcctgctgaagagggctggaatcggtttttgagctggacttttgaagcgtgttggctgtactaccgccctcgatcgtgaccgagtatgctctgaacgcattagacggcaacccgctcgcgtcgccctccgacaaggaccggcgctctggagtgaaacaggcaatctccctggtaacttgaatgccagtcaacatagcaaagggagattctgggacaagatctgagtcaatgccgccgaggttccgaagctggcgccgtttctggtaaatcaccgtccctgctcgtaaatagatggcgaaggtcaatgagataatgagccagactggtccgtagaagatagcgatgcggaggaaggaccactgtacagagatccagcaccagagctgtcggtggatgattggattagcatagggtgatagaagggaggactttggggttctgctcacgagggcggagccatatattcggccccgagcttgggtctggatgaagaagtatgcgaaagctgggacgaatggaacaccgtaacagcagagcacatatttccattcgagccgacgtagttgctccgagtcgtatttgtggaagaatgttaggtaaacattgcatgccattgcaaaagtccatagtgcatcggcgggcatgaacctatgcatccttgcttattagtggccatctgctaatggtgttagttccgatttgatacgaaccattgaatcaaaaacccttgaaactggcacagggaactatcaaccccagaatgaatcccgtctgccgatatgatggtggctatattagccatcatgttaccccatgatgcatagaacaccaagcggttgatgggtttacggaatgtgggggaccaaataaaagtagcgactataacgaaagtgccaacaagggagacagtcgagcaaacacgctctgtagccgagatggctaatatttgttgttctgacagcgtcatggtacatggtctatgacctagtcgtcgcgaaaaggggagggcgtccagctcctgaaggttatagattatatccactgcagatatgaaccgagaagatccccgtggttcaacaaagccaagttagcttgtgacaaatcgaggatgcagatgaccgtagacttaccagcgggggacttattttcgggttggggttaacccttgaaatagaaggcaaacggttcgagtaaatatgcccagagcacaataccacctgcttattatccgcaacgggcaacaaaggaaaaaggcaaatgacaaatgaggcaagaccaggccaatcaggatatttctggttatttctttcggcttatagctaggaagatgaccttgtgccgagtcatgcaacaaaggacgcagtcccaacagtattaggttcgaacaactgccaagaaacggagtaagaaccaagcaggacatcttttaaatgttttcctcatttcaaataccgcatgggccagggctcaagccggtactcctagggaaggacatgcgaacgattccagtgtgatggtaccacaacgtgcaatctcccagaattcacggaatagataggagattggacaagggatgagtgctggtctgcatagaaaagcctcggaggcatagcccttggggttgcaccaatgattagagtcattgtttaggcgtgcagcctttgtccccgccgctattggggttcgacagtgcttgaaggggtgaagttacctgaatatgtcaagggttacagcggggacgatatttgaggggccttgtgagatcctagagtcagttcgcccatgtgtgacactagcacaactgtttccccccgacgttctcacagctcattagtcgttgtagaagaccagattgaaagacgggtgactgcatgtttgaaagatttttgcgaacaagcaagcataaaggaattcaaacgccaacggaatgcctgaaagggttgctcttaagtacttatggttgggtacttggaataaggcgcagtacagcagctatgagctcgctcgtcccgaaaatccttggccggtggacaaagaaccagttgcagcaacatgacaagatattcccgaggattgcagttccagcggggaaatttgaactaggcccaagtgcttgttgcacacatctcgctgtgtgtgttaataaatacagattggggtggatgacagaatgcatttctcgaggaatagctattgctatttagaagacgacaggcagaaggctgacaaaatctggagcgctgctccagaacattatcaagacaacagacagtgccccgaagtcaattcatctccaattaggccatatactcctcatctttgacaaaactggcccaaaatccgcaatatcaagttgtttttttttaaaaaaaaaagaaaaaaagagacgcaaaaatatccatcatcgggtataacgccgaattctcccatgtccaattgtccaatcgagctcgtcatctcgtcatgcgcaggctagaccgctaataagcgggctgcggggggatcatgcctccatatccagccatctgctgttgctggtgttgctgctgcaatttagcctggatctgaggcaaatcatggaaccacgggtgctgcagagcctcgttggcgctgatgcgcatctccggacggagttggagcatacggtttaacagatccatcccgatagcatccatttgagggatgatcagcgaaagatcctgcgtggcgtagatttggaaatcggacttgtattctggcaactgcgagatgccgggccatgtccgctcggatggtgtacccatcagacggaagatcttgaccaattgatcctcgttagttgtgccggggaaaagcggacggcccgtgtacatctctgccatgatgcagccagcggaccagatgtcaatgctggtgttgtaggtgcgacttccgaggaggacgtccggtgcgcggtaccacagagtgactacttcgttggagaaggtattgaccgggatgccgaatgcgcgggcaagtccaaagtcacccagcttgagctgacccttcttgttgattaggaggttctgtggcttcagatcgcggtggaggactcggttgtcatgacagaaagcgatgcccttgagtagttggtgcatgaaagatttgactgtggcaggatccagctgtccacgatcaccgcgagtgtccatatatctcttcaaatctctgtccataaactcaaaaacaagcataagtttgttttccgtgtggatgacatcgtatagcgagacaatactctcatgcttcagctccttcatgagtgagatctcacggattgcagtcgacggtgttccctcctccgaatccaagtggatttccttcagcgctaccatttcaccggtttggcgattgcgccctttaaagacctgtagtattctgcatcagcggtgagcgggggagaggcgatcatgctaggagccgggggagatgaggggagagagatcgagagagattgagacgtacggtagcatatgtgccttcaccgagctaaagataagacgaatactcgttagtgaagattccagacccgataatgaggggaaaggcataccttttccagctgctggaaggagctgggctgctgagtcttgtccattttttgtggaactttggaagccggtggccccgatggtttgggtttagaatgaaagagaaagtgaccaggggataccagatttgaggcgatctttaaagggtgggcaggatccctgaagtgctccatgctgagacgtgagggaggagccccgcgctgagtggcccgggacttgtcatagttggcccttttcttttggcctgagttggcaggcgcttattatttctacactgattttggtttctattgttgctataactggtacattgtttataatttgtttttagaatgtcctcttgttattttctaaatctataaattggctggaagttgggatacaacggtcggaaggactgactggcatggatggctacaccggacatgaggagtaggttcatgcccaagatttccaaaaagcagggcttcgttcctcacgccaccaacattgacaataccaatcggcatgcctcgtttgtgtgctcgttccactaggcgccacgccgagaaagtcgccaggctgctacctaggatgagtagccgcccagcatcgtcgatcgcttcttcagccgctgtcttcaccagtggatcgatattttcaccaaacatgatcactgccggtttcaaaatgccggcgtttgaagtcgccgataatgccccgtcactctctacctctacaatcgcctttgtgccatcgcgcagcgtgggaggattctccaagcatgtcggacatggaggataacggaaggtagaatatggcgcttcagcgaggtcaacgtcgccatccgggttgagcttcaagcctttccgccgttgctcttccggattatcggtatcgagcgcaccctctgcaaccatacgagccaaaaactccgcccaagctggattaagtttctccagcgacgcttgaaagtcggcgcggggaagttggttttgacagcttacgcagacgaccgatcgcaagtatccgtgtagttcgagggtagacagttcgggatgcgcgagggaatgaaacgagtcgacattctgcgttacaacggaactgatgtaccctttttcaccgagacctttaattgcccaatgagtcgaattcggctttgctttcagaagcccgggccagccaacgaagctgcgcgcccaataccgcttgcgtgactcatggtgggagatgaactcgtggtagtaaatcggacggtaagatttgtttcgccggtaggtaccttggtcgcctcgataatctgacagaccagacgcgacggagatacctgcaccagtcagcagtactgtctgggaatgtctccccacatcgacgccgcggagatttaaggacggtggcgcagtgaagaaagtgttgatagcatcaattgcccctgcaagtgtcgttgcagcccgaggtgttataatagcaggcggcaatggtcccgtgaaagggatccgaatagcaggcgtcgtcattgaagaccatcatatgttcaccgatgtcttggcggaacggggagtggaggttctccaacaatggcgtagttgcttggcggacacgaaggtattgtcaaagattaaattaaagtaatctgaaggataaataaggaatctgataggctccgggttggtagtccggtttgaggggatcaataggagtcatggagatggtcatggggagaaatgcaaacgtgcagattggattggaaacggaaaattccagggaatagccggatgacatgaacatcccacttacacctgggcaaactcatctttcaggcggattagatgtaacttgtacggaaatccctgtctttactacataaagacccctgaaaagaacactctgtccaatcctttgtgctcgcgtgccttcgacgcgatgccactgacgcagcccctatgcaggctcaggcttcgccctctccacttaaggatctccagtctcacatcacttactgcccagcggcgtatacttacatccactccttttttaaaagacgcttcttcctttatttttcactccagacctcgttccatcccacgagcggcaacacctctcgctatgacacaaactagggatcatggccatagccacggccccggtcaccaccacgacaatacctacctcacttccacaaacaaacgcgacgctggtgttcgcatcacacggattggtctcgttgctaatctgtgcatggccattggaaaattcgttggtggctatgtctttcactctcaatccctcatcgccgacgcataccacgcgctcaccgatcttgtctccgactttttgacgctgggaactgtcgcctggtctctgaagcccccgagcgaacgattccccaatggatatggaaaaatcgagagcatcggtgcgctaggagttagtgggctcctgctctgtggaggagtgttcatgggtctcaacgcgggacaggtcctactagctcatttctaccccgaggtggctgaaacagtagctcactccgggattttgggacatggtcattcgcacagtcatgggccaatcggtcctagcatccacgcagcgtggatcgcaggaggttcgattgtggtcaaggagtggctttaccgtgctagtaagtaaagcgatatagggtgtatgagtgtttgttatccatcaggtgactaactttattccagccatgaaggttgccaaagagcgcaagtcctccgtgcttgcatctaacgccgttcaccaccgcgtcgactccctaacgagtatcgtcgcccttgtcacaatcggaggaagctatgtcttccaagacgccacctggctggatccagttggcggggtcctgatctccttgatggtcatcaaagccggttggggcaacacatgtacctcccttttagagttggcggatactacggttgatgaggaagtccgacactccgtggaggatgctgcctccttggcattgaaggatatccaggatggacacgaggtgatcgttcgggatgtgcagggcctgaaatccggccaaaactacctaatggacattgagttggctgtgccgggggcctggcctattagtcggtcacaacacattgaagaggtcgttcgccacgccgttggatctggagttcgtggcgtgaagcgcatcaaggtccgctttattcctgcggaacatcaggacctcacgttctcggatgagtttgttgcacaagatgttagtggtgatccagagacactccaagatacccggaagcggcaatagggatgtaattctgcaatgatacccttggatgcgggatctatgtctataaatcgaatatagaacaagttcataatactaaacagagtacggagtacaaagtaagtatattgtactacagagtataaagtgtatagtatagtggggtaattctattctaccgagaatttagcagagcaacagctcaaaagagctatttacccggcaaaacctgctcgggctggacttgacattcctggagaatccatcaatctgacctaattggccctcggtgctcacttgccactttccaattgtccgctgtaccctgtggttatcgaagacataagaggatgcataaagtccaccgggaccggttatagtccttttacatcatcggtccatcccacctacacttcttttcccggactcaccccttgatcattgaattacattacatatcttcgcctaaatctggaagaatctcactttatctttcctgtcactctatcgcctggtattgtatctcttcggtcatggcgtccgatggccccctctacattggattcgatctctcaacgcagcaattgaaaggattagttgtcaactccgatcttaaagtggtctgcattgccaaattcgacttcgatgccgactcgcatgggttcccgatcaaaaaaggcgttctgaccaatgaagccgaacatgaggtgtttgccccggtcgctttgtggctgcaggcgttggacggtgtactagaaagtctgcgcaagcaggggctcgatttccgccgtgtgcaaggaattagtggtgcaggacagcagcacggaagtgtatactggggtcataatgcggagtcgcttctccgcaatctagattctagcaagtccctggagacacagctggaaggcgctttctcccacccatacagtcccaattggcaagactcgagcacccagaaagaatgtgatgagtttgatgcagctctcggcaagcccgaagatttggcgcaagccaccggaagcaaagcgcaccatgtaagagaagcatcacagtcttaagtataggcggggcaagcgtgctgacactgtcgtcagagattcacaggtcctcaaatcctccggttcacacggaaataccccgagatttatgagaagacctcgagaatctcattggtgtcatctttcttggcatcccttttcctcggccatgtcgccccattcgatatctccgacgtgtgcgggatgaacttgtggaacattcagaaaggggagtacgacgagcgcctgattcagctgtgctctggtgtttttggaggcgaggatctcaagaagaagctcggcgaggtaccggaagatggaggcctgcacctgggcccggtccatccatatttcgtggagcgtttcggctttagtcccgattgtacggttattccagcaactggtgataacccggcgaccatccttgcgctgccactactgccatcagatgcaatggtttcgctcggcacgtctactaccttcctcatgtccacccccagctacaaaccggatccggccacccacttcttcaaccaccctactacacctggcttgtacatgttcatgctgtgctataagaacggtggcctggcccgtgagcacgtccgggacgcaatcaatgaaagcctgaaggatacccctgcccaaccctgggccaactttgacaaggttgcgctgcagactcccccattgggccaacggagcccatcgggcctgatgaagatgggcctgttcttcccgcgacacgagattgtcccgaacatccgtaagggccaatggcgttttacatacgatgccaacaccggaattctacaagagacgaccgatggatggaactcaccgcaggacgaagcccgcgccatcgtcgagagccagtttctttcactgcgcttgcggtctcgagaccttacccagagcccaggaggtggaattccctcacagccacgccgagtttatctcgttggtggaggatctaagaataaggcaattgccaaaattgctggcgagattctcggcggtgttgagggtgtatactcgcttgatgtcagcgacaatgcctgcgccctgggtgccgcatacaaggctgtttggggtatcgagcgagagcccggccaaacatttgagagcctgatcgggcagcgatggaacgaggatgatttcattgagaaaattgcggatgggtatcaaaaggggttgtttgaacagtacggcctggccgtcgagggctttgcgcagatggaaaagcaggttttgcagcaagaggctgacaaggccaatgcagctgcaaattgaaactactatagacataaaaaaatgggagtataatttatttagcatcagtttagctattttcaagcctcatatagcaagggaaatagtacatatagtacgatgttttaacaacaaagctcccgcccaaaaacaacttcgtgcaagccccttgccctatttagaaaaacgccaagaacatcacatttgaatcaaaatctccatatctctactcgaaatacgttggacattggatttgaagacctgccactctcttggcaagcgaaggcggaacttggtgcacgggaccgattacgacatccagtttgaatgtctgcaggtgatatctcctccaccgaaaacaattttaaaacaacacacacctcccctacgttttgatttccctctctccttcccacaccttgaagggagactggaagatggaagaacaggtgagtctcccaattttgttgagcaccctcaaaaaccaaaaaaaattccaataccccaacaccgcccctcccccgccgtttcaaacaacctctccgatacctttccctcaactcaagacacaagatcattgacacatcctaggtagcaaatgcaattgagatcgcctggaatccatcctccgacccagccctaaagtcgcaagcttacgaataccttaaccaactccgctctgacccctccggatggcaggtttgcctctccctcttcaccaaaaccccacaacagcccgaagtcgtacggcatgtcagtctggagattgtcaatagtgctgcccaggtcggtttgatcgatccggcctcgctcggtgtcgttcgagatagtgtgctagcctacattcgccaggtctacggcccggaggccactgccacccccgatcctccttacatccagaataaaattgcacagaccgttactttcctcttctcctccctctatgcgaacggctgggagacttgtattgacgatctactgagcctgaccaacaaatccgcgggccgggataaccaaatcggcgttgttttttacctgcgtgtgctgagttcaattcacgaggagattggcgatgtgctggtttctagatcccgcggggaacaggataaggcgaatgcgctgaaggacctgatccgtgagcgggacatgcagaaaattgccaactcctggcaggagattttggcggtctggcgggaaggtgatgatgtgattgtcgagatgtgcttgaaggcggttggtagttgggttagctggatcgatattggtcttgtcgtgaaccagaccatgttagacctgctgttccagcagcttggacgggccgagaaacaggagcttcgggagggagaacagcgggtgcgtgatgcggccgtggatgtcttcaccgaaatcattggcaagaagatgaaaccttcagacaaaattgagatgatcgctttcttgaacctcgactccatcatcacgcagctgtctaacagctctccactacgggagagccgattcacatccaagtacgatactgatttggcggagacggttgccaagcttgtcaacaacacagtcgtggatattgtgcgggtattggataatgatgctggtcccgtcaaggagcaggcagaaaaccttctgcaggtcttcctgcctcacattctgcgattcttctcagacgagtacgacgaagtctgttcgactgttattccttgcgtcaacgatatgctcacctacgtccggaaactcgcaaaggcgaacccatccttcgaacagcgaaacaagtccatcctgcttccgattttgaaggcaatcattgcaaaaatgcggtacgacgagacctcaaactggggcgaggaggacgagcagacagatgaggcagagttccaagacctgcgcaaaagactaggtgtcttgcagcaaatcatcgcatcggctgatgagcagcttttcatcgatgcgatctcagaggtggtaggaacaactttccaaaaactgcgggcatccggtgggcagctcgattggcgtgacctagatctcgctttgcacgagatgttcctgtttggcgatctggccgtcagaggtggcagtctctacctgaagggcgcgcctactaacatggctgcgaaccgtctcatcgagatgatgcttgcgatggtagagtccgatatccgatcattcacccacccggcgacccaacttcaatacatggagatatgtgttcgttatagctcgttcttcactcaccatactcatctcatccccggagttctggagagcttcctccagcttgtgcaccaccctgttcgaaaagtcaagactcgttcatggtatctcttccagcggttagctagacagctgcgcagccaaattggcaacgtagcacaaactgttgtggaggcattgagtgacttgttggttatccaggccgaggtgccttcagagggcgatgacgctgatgagatgtcttccgaggaccacgagggctccgcggacgccgtgttcaacagtcagctgtaccttttcgagtcagttggaataatttcctcgaccccaagtgttagcgcagataagcaggttctctacgcccagtcggtaatgaaccctgtctttaacgatatggaacgtaacctcgaagcggccaaggccaatgacgaacgtgcattgctgcagattcaccacgatatcatggccctaggaaccctcgcccgtggttactcggattggcagccgggcaccagctcacccgcagctctgcccgtgcctgaggtctcggcggctttcgcccaggttgctgaagcgaccttggttgcacttgagtctctcagttcttcattcaatatccgaactgctgctcgctttgcgttctcgcggctcattggtgttctgggcgcgcagattctccctcaactgccccgatggatcgatggactcttgactcagacttcgtcacgagacgagatggccctgttcctccgccttttagatcaggtcatctttggattcaagggtgagatatatagtatcctcgacacgctcctgactcccttcttgcagagagtcttctctggcattgccgatccgacaaccggcactgatgacgagatccaacttgccgagttgaagcgagagtacctgaacttcttgctggctgtactaaacaatgatttgggaactgtaatcattagcgaaaggaaccagcccatcttcgagaccgtcatcaccaccatcgaacacttcgctaaagatatcgacgacttcacaaccgccaagatggcgttctctgtcttgggccgtatggcaagctgctggggtggacctgatattgcccctgcccctgccaatggcaccgcacctgcccaagccgcactccccggctttggtggattcatgatcacccggttctcgcctttgtgttgggcactgcccacgacaccatccttcaactccaaagatgcacaagctaagcaggtccttgccgaggccggcgctttgcaacgcactatctactccaagacaggcatggaatatgcggaatacttgcgcagccaggaattgcccggcatgggcatgggggccgacctcatcgaagagttcctgaccgctatgaaccagctggacgtgaaagggttccggcaattcttcccggtatgtgctaatgccttaatacttccaacgctttcgatctacgtggcatccaactaattcatatgcaattgccaacagtcattcatccaacgattgagcgcatgaagtttcctttcctcctctctatctgctttctagattcccccatccattttccatatttacgttctgacgcgacgaggtgacgtctgtcctcatgtcgccctgtgacttcaatcttctataccatctacatcatcccacccaagcatcccgatcccgataccttacttgcccaacttgaaccccaagaatagtgctggatcaaactctcgggggcaaatcagaaagaacaaaagaatttacctgattttcaaaagttccgagtatatagcttgcttcttgcttttcattgatctcttttgctcatggtgcattcgcattgtggtgttcatttgtatcccccgacaaccacttcacggcgtatcctttttatctgccccccctctctcttgtcggctttataggataagaccgaaaggggcttattttttctcgtgtcttgtgttgaatcactttcaactttaatggtgtgaactggagtaggtagatcatgaaatgaagtggtagagttgcctcaataagctcaacagagtattgactacaagaagcttagaatggattgctacgtacaatatagtaacctgatctgtttccaaccttggagaagacaagtcaccattcggtcatctccactacaatcctgctactccccacgatgtaacccttctttcggttctacctactagcctggaggccaaaaagtatgatatgctcagaaaatgtgctgcctattaagaaatgtaactctaggataagccacaatatgaacggatggcgatctagggccagtctcttgttatacaaggcagacatatctaggaggctagtagctctatgctgtatctgagatgcaggatctgagggattctccgctaaacgtcaatcaccttccgatttatgatgtactccacactccgtacaagcatctgcattgggagcagaatttgattctggactggcttttgtattagtatagtgcacatgactatatttgtggtttaccacatcaaaacttgaatacctgagactaaagaagtgcaggtggagtcggcattaatcttgcatccttgtatgaagaattctttagggttagcgattggacaaccccaattgtttggtataattagagattgactaaagttctcgacagatgggacgatcgaagagatagatttgtaaatctagagctacctataacgtaatatagagtagaaaatcgcttgagaagttgcatagttatccattccatgcatgccctatcccaagcccaatatctcatgcagctagcaaaaatccctcaaaaacagcttgtaagttggtaaactaatttatatccctgtctagacccactgggggccatttttctcatctgttattcgcctctccttcatctcgagagatctaaacctccaaaccatcagtgtaaaaacgacagacttccggtttcccctccagaaatatttaagcaatgcctactttggttaatcgcatattcgaaatagctcgcttctgttgcctatctggtctcattattttcaacggcctctactgctatgttgtttccgaagagtgtgctgatcacggcactttgctatctttcaacttcatcgctggcctctaccttgccttcatctatccaagggcagccagttccagacaagtggttccaaatctcgctcaatgagagcacttctgggaataccagccccagtacaaggaacatcgacaatgctcttgtggaacgaactcccatccaggtctgcgagcgtatcattaccgcgaccgctgcctgcactgtgatcgcaggttatgtgatttcatttgcaaatcgatgggagccacaatcaaggagctctccaatcagggcaactgcaatctcatgcgtggcagctatcagaacctcagatggacataccaatcttccggccgaaactgcgatactacagcacagcaggcaaccatttctggcgccatcaagaaatacatgaccaacgtggaacacaacaaaatctgcggcacttgcctttcttccttatgtttcttccatagaacttctgtcatgtttgagctatggaaaatgctgtgatgcttaggcctcatgtgatagtattccctgcaagcttcccgatatttgtctctagttatacatccctggttatatattgaaaatccggctgcacattctaagccttttcccgctttgtttcgccatctagttatgaaaccgagaaaggagagaaaatgccaagagacatcaaagaccaccaaaaagacacgataaagccacttatgccgccgactacccttgtagtttccacaagatagaaggtttcttcctctttcaagtgccctatagctatcgggaacactccgtacaatcactcgtgttcttgggtgtatgtaccttattaatcattgggataaaaatagcatcagttatcgtgctagtggttgtgtcaaaaactgtctaaatcttctttagccttccaacattcacatccatcaaagtcttcgaatacattgacgtttcatggctcagaattgcttgaccggcgcttgcctctgcaagaacatagcataccgtattacgttgcccgcgtcagaatcaccccctaaggtatagtttatctccaacttgcccaatcagcaaatcccattcgcttactgacaatctcgccaggtgatcatctgtcactacaccaattgcaaacgctatacgggctccagcttctctgccaatatcatcgtgccacaatctagtttgcagcacatcaaggggtcacccaagttgtattcggatcgtagcaacaaggacacgcaggtattgcgcgagctctgccctgattgcggtacgccattcacatcacgatcaagcgatgatcaagaagtcattgcggtgaagtcgaggacactcgatgaagaacaccgacttaactgtgcgaagttggcaatggaaatctactaccatcgaaaggataaatgggtggacgagatccctcctgcttctgccctaacagcgagttcaccagcgaagtcagttcctgcatccaagcctagtgtgcctccaagtccgatccaatccgccctctcctacttcaccggctatcagcgagcttctgagggttggctcgagaaagtcaatcgcgccttccttatatcgaccaggtcgcactttccattgtaagtaagcccaggtaaataaaagtagcatcgaacactcatgtaaactcttcttctttttgatctccgtcagaatttatctcaatctttacgacatgtcttttcccagaatttataatttctttgcgcagaaatgtgtgccggtgaccggcaatctctcagcgattgtcggtagtgccatcgccgttgcaacgtggagggctaagctcgcagaagaccgagctaaagccaaagagacagacaatccccctccacacggagtgaagtaatcttgctcgtcaagattaccgggcgcttgctggatgggcaactccagcgtgtgcttgctattgaagacggttgcagtgtccattggacctgtctccgacggatatagctcctccctcggcttaatgacataggggctggattctagagctctgtctctacagactgacagtgggtttgttcacgcagctccactggcagtctggatcgagtgcttgcacatacttcgttgtcctgcgccccttttttttatatatatctatagcccctcttgctgaccgagggtgcatttattaaagaaaacaaaaaaaggtccacgcggttgggtggttaggttgggcctgggacaatcttgctttcattttcgctgtgagtacttccaaatggatgccctgttgctgctgactgacagtgggttggttgagcattgctcgcatttcttgtgacagtctgggacacgaaggtggaagaacccgaagtgtcggtgtttcactgggcaggtggtctcggtcccgtaagtcataacggtggtagtggcaccctcaggagtggtgggtgtggagttggcgccaacgcttgatcagacggcactggtgacagcgggccccataggagcagttgtggcagcgaccagagggagccggggtgcttccagcagcgatagagctgaaaatgtttgaagtggaggtcagggtaacagttgaaaccgtgctggatgtacgtcggatcggtactgtgagtgctgttggagtagggaaggcactataggtaactataacttcgaagttttctacggcaaaggaaataaaactctagttagcatgtcaattgactgatgatgtgagcatttttgttatggtacacatttgggacctaccagctccaaaggtgactggtcccgagaaaaaagaaagaaaaaacacgcctgcatcaagggaaataaggaacgaaaaaggaacagtatcaaccccggtttaccaggcctcggtgtcgaagttctcaacgccgaagtatgaggcaacaactgtacggtcagagaacttgcgacccgccagcgctttgagagcggtggtggcggattcagcggtatcgtacttaatgaagattttaccagcgccgtgtccacggcgggggggcttcatcccccgaaacttttccnnnnnnnnnnnnnnnnnnnnnnnnnnnnnnnnnnnnnnnnnnnnnnnnnnnnnnnnnnnnnnnnnnnnnnnnnnnnnnnnnnnnnnnnnnnnnnnnnnnnnnnnnnnnnnnnnnnnnnnnnnnnnnnnnnnnnnnnnnnnnnnnnnnnnnnnnnnnnnnnnnnnnnnnnnnnnnnnnnnnnnnnnnnnnnnnnnnnnnnnnnnnnnnnnnnnnnnnnnnnnnnnnnnnnnnnnnnnnnnnnnnnnnnnnnnnnnnnnnnnnnnnnnnnnnnnnnnnnnnnnnnnnnnnnnnnnnnnnnnnnnnnnnnnnnnnnnnnnnnnnnnnnnnnnnnnnnnnnnnnnnnnnnnnnnnnnnnnnnnnnnnnnnnnnnnnnaatgaagattttaccagcgccgtgtccacggcgggggatcttcatcccgagaatctttccgaacttggcgcattcctcgctcacatcctccatgatttcttcgtaatcttcgtcattgaggagctcgtcaagcgtgaccatgttgagaagctgcaggacctgggtggtctctagatcctgggaggtcgtcttggcgaacatctgcatggcattcacgcccatgtcgaggccagaggcttgtgtggttccaacgctggcgagagcaaacttaaggtggtgatcgactagttccatgccgttcaaaccttcaacggcaagcgcagtgttgttcgggtcgacgtattcataaaaggcaattccctggaaaagttagaaagaatttgacggtagggaaatactcaacttacccgagactcctctgtagcagcatccttgaccaagacaaatgacttaaggtcgccgaatgacttgagcaacatgataatagcttcctcgttgatgtaggttggaatattagagatgcagatcttgttgggtgagtcaggcacctcgctcagaacgacgtccggctgtactggctgcgatgcgctcccgtcgggaacaatgtagtcctttggccgtcgcacttcaagtcccttgtctccactctccgccatggtaattccatcgaaagccaatgcgactgtggcgtcatttggatccttgaactccaggagcgcgaatgttttatcttcagaaacttgggcagagatgcagggatcgacattgtgaataacattgagtccattcaattgaagattgaagaaggtaataacggcatcgcccgagacaccggacgggatgttgtaaacgaaaagacgctttgattgacgagagttagaaggcttgagggcagcattgtcgctatcgccagtgggagggttcaggaagtccttcatgcggctggggtccatcggctgctgacgaggagctccgggaagagggaacatccctgttgatgttagacggttccactagctcataagctttaaacacatacctgagatctttgcctgttcagccgtaacattctcataaccaggaggcttcatgtcccattgagtcaaacgacgtttacgggtcaacaccgagggcacatctgtcaaatcgggggtaggctccttgcgccgcgggggcgtggcgcttcgcttgcggtctcttctctcacggtctccacggtcaccacggtcaccgccaccacgtccaccgcgtcggtcgtcaaacaagtcgcgacggggtctttcgtcaaagtcacgtcgacgaccaccaccgcgatctccaccaccacggtcaccacccccacgatcaccaccaccacggtcaccacccccacgctcagcgcggtcacctcgctcggcacggtcgccacggtcccactctcgatcatcacggcggccagagtagcggtcttcgcgctcacgggcacggtagtcacggctggttgagtacgagttcacttcgcgctcccgacgagatccatgatgaggcgaacgcgaacggcgtcgttcaccgcgatcactcctatcgccccgttcagctccacgctcggttcctcgttcggcaccacgctcagcacctcggtcggcaggtcgctcagctccgcgttcgggtctgtcaccccggtctcgatcacgccgctcgtcgcgctagaattggggttaatcgccgcggttgcgaccaaagattggctgatacttacgaagtagtcgcgggaacgtccagtctcttggggatattagcagttataccagaagttaatgtaaggatacttacctctggatgagtaggtgtcaccgttcatgttgaggttggttgaggaaataaatgaacctgtcgccagtgaaggggaaaactcatgacccagagctgcaggcggtgatggcctcaccgcccgtgtgtcgattcggattccggcagaaaatacaaacatggagacagcgactccgccgtctcgaatcagtaatttggatttcaaacatgtctctaggtgttttgtcagaatggcagaagctgcctttgagcttgagtgagctttgcatcaatactacgctcagatgcggccagtcttttaggtttgtcagccaagtttccgggtccggggattgtagatcaagcgactgaccctttttagatggcggaactttccagagagtcaggaatggcgatgcgttctctatggccatcttctgtcgctgaagcaagactcaaacttcttgtactatagatctgtgcaacctccttcccatgcattcaccgacaatgatcatctcatccgcattatcaaacattacttcaacctaacgccaaatttgactgaactctactctcaatggtcatcacaagaccccaatttcaagaagaaggctgcgcaattcaccgggatcaggatccttcgacaagatgcatgggaagcattggtatcatttatctgcagcagcaacaataatattgcacggatctcacaaatggtggagaagttatgcatacattatggaaagcccgtggccacaattgaagggcgtgcatatcatgattttcctcccccaggcgcattgactggcaaggatgtggaaagcaatctgcgcaatttaggatttggataccgggctaaatacatataccaaactgcggttatggtatccaaccgagagcagggctggctagatagcttgagcaaccccgagtgtccagcatttggcgtggatcctaaaccaagcggcgaaatgaaaccagaagggcgagagggatatcgtgaagctcatgaaaagcttcttgagctacagggagttgggccaaaagtgtcagactgtgtcagtttgatgggattaggctggggagagtccgtgccggttgatactcatggtgagttcttttgataatgtttctgatttatctctaatcctttacgatagtgtggcaaatcgcacagcgagattaccgttttggaaaaagctccaataagaacttgaacaagacgacttatgatgctgttgccaatcatttccgcaagctttggggtaaggaagctggatgggcccatagtgtgcttttcactgcggacctgcggacctttgcagacaaacttgctgcaactaagaaagttgaggtgaaggtgaaagacgaagagtctgatgtcaaggttgagacaaaagtgacaactgctctctctttgaaggtttctaaggaggaaaacgtcgatgtgaaagtcaaggtcgaagacatagatgatgccaagaagcccagggacaagaagagaaaggagactgagaacattattcctgttgttcaaacaacagagacacggagaatgtccaagagactaaagcgttgaagccactaaagacaagcaaaggactattcttgactactacttttaccgcagaaaatatctatacatcttaataatgaatatgccagacgcaaaaatgtacgacgagacacgagtctagtgcaattaacatgggtatttgtattcaataatcttagctatatcaatgatcaatgcctacaaccgtagttagtataacggtcgaacaactcttaacacaagtcttgaagttggaagaggtagatcagaagtccaggtagatcatcgagctagcatccgaaaacactagctctgacataagaggtaccagaaaataaagtataacaaatgcgttgtatcatcatgtgggaatattggagattgagcaagaagaggttgaactgacctgatataagagtggcgagaggcgtgtcgagtgtatatcgtacagctcgcactcaagttgaaccagaaaccattaattccagtcgactcaagtgcagaactgggtttgtcggttgttggtgttcgaacaaaatcggaagagaaatgaagtgaggttttgtcgaagaaaagaaataagcgaagtctatcacgtgaccccacacaggccccatctttcccgcccactctcactctcacacttctcgattttcgatctttcatccacgccgacaaccgaccagatttcctccgccggacacatcaccaatccaaaatgggtcgtcttcacagcaagggcaagggcattgcctcctccgccatcccctactcccgcacccccccggcgtggctcaagaccacccccgaccaggttgtcgaccacatctgcaagctggctaagaagggtgccaccccttcccagatcggtgttgtcctccgtgactcccacggcattgcccaggtcaagattgttactggtatgaaaactcagaaaaacgcgactctaggaattggaggattgaagatttctaacattttcgcgcaggtaacaagatcctccgtatcttgaagtccagcggtacgactccctccgcccgcatatttacatctgtcgggtgaagagagcgaacaatttgtgtggataaactttctggttcggtgaaagaacccgttggttttgaagcgcaaaatgctcgtctctctccccgagactggtcgcagaaatgcaccagcaattaagcctctgcttggtcaagaacatctagactgacagagagattttggaatacaggcctcgctcccgaactccccgaggacctttacttcctgatcaagaaggtaaaaagaattactccttccccccccccccccccccccctctnnnnnnnnnnnnnnnnnnnnnnnnnnnnnnnnnnnnnnnnnnnnnnnnnnnnnnnnnnnnnnnnnnnnnnnnnnnnnnnnnnnnnnnnnnnnnnnnnnnnnnnnnnnnnnnnnnnnnnnnnnnnnnnnnnnnnnnnnnnnnnnnnnnnnnnnnnnnnnnnnnnnnnnnnnnnnnnnnnnnnnnnnnnnnnnnnnnnnnnnnnnnnnnnnnnnnnnnnnnnnnnnnnnnnnnnnnnnnnnnnnnnnnnnnnnnnnnnnnnnnnnnnnnnnnnnnnnnnnnnnnnnnnnnnnnnnnnnnnnnnnnnnnnnnnnnnnnnnnnnnnnnnnnnnnnnnnnnnnnnnnnnnnnnnnnnnnnnnnnnaaaaaggaaaaaaaaatactccccccccccccccccccctccttttatccatgtagattatgctaaccttgattatctaggccgtcgctgtccgcaagcaccttgaccgtaaccgcaaggacaaggactccaagttccgcctgattttgatcgagtcccgcatccaccgtctgtctcgttactacaagaccgtcggtgtcctgccccccacctggcgctacgagagcgccactgcctccacccttgtcgcataagcgcattttgggaggatgagtggttgacggaggaaacccatcggatcgtcgtgatagtcatatctggagggtctatcttctgctaggtacaacaaaaaagattacgattatttgataccctgttcatgaatgctctagactcctttgataattgtaggttcggctagtaggttagatctaggtaattttgttgcataagtgatcactcgtccgccaacacaaggtagttcagtataacatactagtatctactatttgacccatgtggttatacacattgtatgactctaagtagacacatatccaagtgtatatataggtgttctcacaactcacactcagcagctctaacctccctcgctacagcattgcaaagctcaactttaacaccagctcctaacaagatatggatccaaaggcgctgagtatcactcagccgatcattctccgacttaacctcagcgaacatcaccgtcctcgtctcatgattccagaggaacaagtccgggattcccccaccgcgctgctggtactcctgcgccataaccttgcagatagtagcaagtgcctctccccggaaacattgcacgatctcaactaagtcatctagatcaaaagaccagtcaagcccaacagcgcagggctgcgcctccgcctcacgagcatagacctcacggacgatccgctccgcatccccattcgtgatctcgacaagtcggtgattgatctccgatgcacgagacgggtagaagacatcagtgtggagatcgagcggacacgtctggaacgcagtttggaaaacattgggcacgtatgtaaacaggatatcgtaaaagagatagccgaactgtgatcaagatcagattaaaagctcaatcttccggatattccagactcaccagcgttcgcacaatccccccttcggagtgataccccttccatccatgatcgcggtaccaactcagacacatattctccaccctgcactcgccgccctccctctcatcaatccaaacagttgctttcccctttcgcggagcatcacccgtatcaatacggataccctcaatcgtgcgctcagccggcttgcctagcatgacatgtccgaaatcatgctgctcgcgctttaccacccgtagcgccttttccagcttcgtgatccgcttctgtaggtcgtaatgaaatatcagatggcacagcgggtcttctagtccggcctcgcacgtccgcagcgcaagtctcttccaatgcttgcgctggagttcttcgctgcgcccatctgcaggcgcaagcgcccacatgtagtgttcttccagcagtgccttgcgctggtaccaagcgccgcgccgcgccgcgtggaagagacgttgggcgagaagttcctctagcaactcgtgctcgcgtctatgctccttgaaccgcccgagcgcgtggagactcttgtggatgattcttgtgagcacccatgctggcgagaaccggcgtagataagcgccctcgccgctttcgtacatgttgtcttctttcttttgttcttgctcgacgagctctttccatcggggataggactggttagcaaggtcgatgatttgttggagtgaggcggtcgtgactgggccgttgaattcgaggatgttgtcgatggcgaattgggtttgtatcgctgattcgaattccaatagcgtttctctggacgagaagatggagtttgagcggcagacaatatattcggggaaatttcttttgctcattttggctaggataattgttgtgagggacttttcggtccattcggtggaacgatagaatactaggtgcactcgctcgaagagagtgcgaggcactggcgagatcctgatacatccacccgtgtagtccaatatcttttgggtgaaatggctgtttctgttatttgcgtcttgaagtcctttttgcgtctggctcgtttcgcagagagccgccagcagctctttcttgctcttgccctgaaccttggcctcctttgcaaaggccttgagttcttgcagcaatagaagtgatgaagcctcttccagcgttgtgatcgcttctatgccttctgcaaatctgaacgtatctccgagttctgaaccaggcaggctgcgatcccgctgtaggtcctcagcaacagggagcaagtccgagatatcggagcagtagttcaaccggttgatacggtgccatgcagacgtcttgcggaggaacagtcgaacatacctagtaaagcattaatctcaactataggttatcacattctacaggaaaacatacagatactgggattcgtaggacagcccccgccactgcgcaaagatttccatttcggcctcgtcaaaaagatgcgattcctcatccagcacagtttccagtgcaaggttgaaggcatccacatagatggagcttttgcccttctgccagacgccatctcgtagcctcacatgtaatcccgtcttggtgtcgttctgtagggcctcgtactcctcgattgcgtccttgtcggtcttgatcgcaggaagggaagtttcgagttctgtttggctgctaggaacaatccctaaatcgtccgctgcgggggtctcccccgccgtggccgaaggactcggactcggtggtttaatatctgcgtctgtactagaatactccgtttcaacagttcgccgacgtttcgcgggacgctgcgtctcccagaagttcagcaaggacataatatctcgtttccatggatgcaatcagtcccaatgactcgagtctccaagtataagcagacacgaacgacgtgtctcgcgagcaggtttcgaacacgtgatcacgtgatccatatagctccatcagattgtttgtcctgtttgcgtatgacatagacacaagaggcacagccaaaagcataagaaaggtaaccaaacaaagacgatctgaaacgagagaagaaaaaatgccctctgaaatcattcgaaaagtccccaagtgcaacctctagatataaaaatggccttaccagtaagcagctctccctcctacaacggatcgatacctccgagctccacagcttccgctccgcgaacactcgcattccacttcttcccaaaatatacacctcccaggtactcaattaacctgtgcagcctcccaccctcgcgatctcagatccaccggcttcctcggctcctacagtcaccacagctcaacccccatccacaatgggcgaaacaaacggcactggctccaacacgccgcttggcgatttgggctatgtctctgcgggtcagattcgccccggtggcgcgcctgctcgcgtctatctcaatgagaaggtcgtgccgtatctgcttgatgggatgaagtctgttgcacgcgaacagtgagtggagtattgtgcctggctagcttttttatacttgtctactagatggatttactgatctccttgtctttcgcttttctgcactaggcctgccaatcctctccgtgtgctcggcgagttcttgcttcagaagagcaatgaggtggagggggagactaagaaggagtcggagtagaggggagaggggttgggatttctttgggcgtttcatggtgcttgatcagctattctgatattgtttttatttggttttgaaagcttgtgagtggactttaatgtacactacgatgttcaccacttgataccccggtcgatgtctatatctgtcctgttagtaggaaggatcaatagcagaaaacaagatagagagaatgatatctcgaaaagcgaggtggtgattatctggtataatagattgaggatctacgtacctatgaaagtacggggtagagtattatcaaataggcattttgcaaaaatagagcgttttggcgcatgaattctacatcttgcagtcctttgatctaacgctaaggagggcgaagaacatctaaaaacatatctagaaggtattataatgtgataccatcccaagtaggtcagactactgactactcaacttctgcgtcgtcgaagacacagaccacatgattgtacttctaaacggatatatagacaccggggtacagcttatgggaccatcgaatcatgagagccaaaatatgtattcaagtttggaagcttcatagagattcctaaatggagtaagtacaaggttgttctatatcccgaccaaatattcggggaagaacaaaatattcgaaaatgaaagcttcgaataaagcctagataggtcagcttgcaaaacacatctcacctttaatggcattccaaatcgattaatgcctggagtttaaaggttgagactacaagcgcaaagtcgacggctttgaattgggcgaatggttgatcattcagttgtttagagaagtcgaatacaatcgggccgttactggagatggtgtataggtgaagttgtagctgtagctgtgtgacgaatttgctgaccctgagataaccgaattacagcgataattttctgtccctttgccgctagaagtttttttccccgaagttgcgtcgcaaacagacatgaaagagatacctcatcaagcgaccgaagtgtgcatcgatgaagttgccgagtcgtggcgctccgtggttttttcttttttaaatcgtcgagccgagaattgacaaacaaagacagcgacgccccgtggcccgtcgcccaaatccagcattaaaacaatcccataaacaaagaaaaggggggaggaagtgggcaagttggtgaaacatgggaaccaggaaccaggagacatcaaaggccagtctctgttctggttagaaaataaggggaggcactttacctgccagcgtaccggtcctcgccggcaccgccgccgctgccaccgccaccgccaggagcaccaccagtgctgctgcgtgcctgaccttcgtaggaacgtccaccaccaccagcgtaggggtcgcgagcctcacggggaggggcagcagcatcgaagctaggagggttggcgtcacgatcgtagtagccagcgccgccgccaccgctgccgcgagattcctcagcacctccgcgacgttcatcgcggctgtaacggtcatcacggccaccgccgtagcggtcaccgccaccacggtatgcgtagtcgtcgcgtgattcacggcgaccaccatactcacggccaccaccaccgccaccaccagcgtagtcacggcggccatagtcacgtccgtagtcacggccatagtcacggcgatcattgtaagagtcgtagcgaccgtagcgggagtagtcatcatcgcgacgacgccagccgccaccggagggtccacggcgatcatcgtagcggtcacggcgaggaccacctccacggctaccaccaccaggaccacctgggggaccacctgggccatctaaagaggaaaaatgtaagtcgacgtaaggcgcaaggggacaggacgatgtgacttaccacgtttgggaggaccaaagtactttccaggggtaggggtacgagggcgtgcacgtcgagccttctcgatgctcagggtacgaccttcaataacttcgccctggagaccctccttggcggcatcagcctgctcggcggtgaccatgttcacgaaaccgaatccacgcgactccttggtgtggggatcaagcatgatagaacagttatcgacatcaccgtacttctcaaacagacgcgaaatatcagactcggtcagacgcgggtgaataccagtaacaaagaggttagagccagagttgatggcaccttcatcttcctcgacaggtttgcgggccagaggagctctggggtttattagcttctaattgatataccggactagacaaatacatacctgtcatcagaacggccattgggggagcggctgcgagcacggtcgcggtcggctcgaggctcatcgcgaggagaggcgctgcgctcgcgatcatatcggggctcgtctattgaaaaagggtaaatattttcaagcgcatggaaacaattctaaaagacatacccgcgtagcggctggaatcgttgtcgtagtccgccatgatgaaaggactgaaggtgtaggttgaaagaaggaaggaaaagaagttggaaagctgataagagcggacgctaagcaccggaaactacacacccgaggaatcaggcagcggtgcaaacttgcgtggatttcaagtgaattggatgaattggagggaattgggagaataaaactagaggtttctttttccttttcaaaatacgagtttatgcagggggttatcttgactatgacaaacagctattatgccaagaccgaacaaatcgccatattaaagcttgatagtacatactcatacaactaagactaactcctgagattcgacgctaaaatcaaattcgtgaaccctatacccatcatgtccagaagttaatcatcgtgagcctcgcaaacgtagagtccgacgggtattttgttgtgaagcagccggggtactgggggtctggcccttcaggtctccatcatcaaccaagtccttcaacccttcgagttcatcttcatccaattcactgagttcttcactcattccacgcatgacatcccgtccagtccaccgttcctcgtgaacagtcgtaccgacagggtcaaagggttgcatgtaccattgaatgccacccaaagccaaagggagctgctggtcttgctcggtcaaaacaggcgttggatgtcgatagtaggcgttgacactctttatggggtcttcagcaggaggtagctcttctgccccagatgcttcagggtgttgttcacctgcagtaggctgggcttctgatggagcctcggtcgtaggaagcgtttcctcaactccttccatagcatcagggtgaccagacagctcagtatcaccttccggctcaacagaatcaccactgcgtgacatcacactgtggtcaagaatcatatccagctccttcaattccttctcgaacggtttgcggttgagttcgctctctttcctgatcgcatcctccagggaaggctggatgactttgattatccgctttgccaatttcctcttctcgcgttgctccaggctgagctccggggcgcgaccactgatctgcgcttggagttccgcggtatcgccagcgggctccacgccgatttctgaggtgaatagactggccaagtcagaagagaaggcagcgacggacggatagaatcgttcgttgagcctttgtcggattgacatcaaccctggtgcaaacacaccctttccatcgagcctagaatgaagtcagtatgagcgttgacaaactaggacgagtatatctcacagttgagctttctccaatattggccacagcaatgggaatgtagggaagtagacaagatcgacgatgttacgaagcatctctgcatccttcaacttctccctctcccgtttcttcacttcgtcgcatagcattctcaatcgatcaagatccttgtaaagtcgctcaccaaactcaatgcgacgctctagacgtctgtgtccgggtacacccattgctacatagtctcttcgtgtcatttccatagatgagaaggtctccagctgcaactggagtcgcttgagcaatgctgctccacgcctcgcctctcgtttcaatgtccaatacttggatgcatcttcagcatattgcttcctttggcggactgtaaatcgcccgagagaagcaatcactgagtttaacacaacctgggggataactggcgcaccggaaggcagcttccagattgttctgggaacacgtttccgtttatttccaccgactgttaacgtaaggcgaggagtgagggtgcgatcttcttctgctccatcattggggtgcgcagggcccatcgagagagctgcagcttggctgtctccccagcgtctaccttgcatagtattgcgatagtattcgatagcatcggcagttgcagcatcagtaccatgctccaatcgccagtcagaaggaacgtgcttgtcgcagaaagccttgagaaggtgcgagtccataagaccatggccaatcttcatctttagataaagttgagctctgcgtgcacatgagacatggaaagcaacaaagcagtttttgttgctgcactgaatggatgcacccatccgctgtttgcagatgtagcaattcaacttccagcggctgcgtggaaccttttcgacatcggtcaccggctccataagagatggattaccaatagaaacttcaggaatccagaaagagcagagtaaatgagcccatttagaggaggttgtttgtttgaatgcgccctcagtgtttgggcagaagatacaattggtggatcctcttcccagcaactggcacttgcggcagagccactgaccttctggaatgaaaggaacaccataacactcttgatgcactgcaaggtcgcagccatcgcagaaaacaattgcattcgagttttcacaatcgccatcatcacagatagcacacttgctgtcttgttcttcgcccggtcccgctgtttcgccattgactgcagctgccgagctagagcgaagacgtccggtctgcgggggtttgggattcggcttggggatgcgcttctcaagggcatgccattccctctcaattttggtcatggtaatctcaaacacagcgggcttgatgggctcgagctgatcttcacggcgcttggcattgtattcctccaaccatttttcatcctgttcatccatgtcatattccacacgtccaatggtagtgttaacgtctccatctgtcatggcaggttgaatcacatcaaggtcatcttcttgggtgccttcggtcatccgaataaatcgccggtcatggcgcagaaagagatcactctcctggtatcccacgtttgccatggtccgatcgacatagttttgatgaccgacgcccttcttctcatagaatgtgaaagggtcacgcagtctgaacgacggtttggggagtgtgagtttctcccgggggtttgggcccggaggcggtatgattttttgtccttgctgggcaagaagggcattaaggatagcctcggggcgacgaggtggacggccaggcctgcgtttgattgggattggagaggccatttcgcctgatatgatgactggtgatcctgaaaggtccgagattgtcgcaccagccagtgactccaggcttaagataggacctgaggtatctggagcatcaacctcttcagacgtgaagacagcaattttgccatcaatgtccaagtcgggatgaaactcttcccacccgcgttcttcgcgtggcttgtacccatcgccttgttggagagcaagagcggcggccgttgaagaggtgaaccgaccacgggcttggttcttgtcgcgccttggacgcgacatagagggcggtgttgttggtatgatgggaggtggcggtggaggggctagaaatggttgctccatctcatgtggtggacggcttcgagcacttgcggagtggcggcggggagtagttctcttagaagtttctggggcagtggcggcgacgactgctgcttcagcgtcgaaatcgatgaatcttcctcctcctccagggccacctggaacgtactttcgcttctttgaaggagggccgtcaggggaatcgacggagcggctgttggatgatttgagggaagacctaggtttactgcgtgatgatcgacctgagattgaatgtctggccgtcggtgccataattcaagaacaagctttcgggtgtgtatgtgctcgttggggatgaggattgttaatcggacggcgtcaggtcgcgttcagggcctgactcaggcagggcctcgggaaatatcaaagtcgcaagtatcaagtcatgcgacaggaaactagaaaaagaactagacacaatggacgtaaaggacgccagagcccgtggaacctgcaaggcgcgatgaggtgtttggttatctagtcaaggcggagacgcctgagctgtctgggccttttggcctgaggcgccaatctggacttgaagcacctccgcaggttgacatgggacatgacatccacagctatcctttgcgacctatctgcgattttactcattcgatcgagccttgattttttttttctttcacatagatttacaacatgagcggttctagcgacaccaggtacgcgttatctacctcaaaacaccgcgcagttcagcttcgctaactgttattgccctcctcagatggcggggcggacccagtcgccagggatcgcagcgcaactcgaacaaccgtgataaaacaggaggacagggaagcgcacgggataacaatgctacctggggcgcatccaaccctccgcaggaacagcatgttcctgtacggggcttcaacaccgcagaggtcaagaacgtcctgaagggtatgtatatgcatctaatctccaagtacaagggctaaccaagctttcgcgatatagcaggacctcatggtacgccttatcgctgcctccatatatactcaagcctaacctatgcgccatcgatacagaaaccaagtcggcggtgccctacaaatctcattctaaagacggccctacccaacgatctactgcctggggtgccaagggtacagtctctctttgatcgcagcatacccttgagcgaagaataaccatatctacagcacaaaacatggcgaacggcagagacttcttcctggagcttcggaaacagattacttcgctgcagcgaagcggtccccctgtcggcggctgatcacgacgtttacgacttcattatctcaaagtacttgcattgcacagtcggtcggtcgcgagtttggttcgttttcatgggttgctacggcgcatcttcgataccctactgtggaggatgcatgggtgatgagtggactcggaagttacatggcatcggcgtctccgatggttctgggtcttacatgtccataatgcactatgactcctgtttttcaaatttattcattacaattcatgcgctgcatcgaagtttatggcgatgcattattttacacacgctattatacagagagggcatgtcactaatatacaagcaggtagccattcagctacaattttcacaatttgatccacccccctgggccaaggatacctccatcatcagcctgcgagtcgagggtccatgtccgcagaggacgacagctgaggtcggatcggaagccagcttcgaacatctcaatgcccgcccacccaatcatggccgcattgtcggtacacaaatatggaggcggagcaacaatcttgatatggccaaaaccgcgcacttccaaaaatgaagtaagcactttcatgaggaactggttagcggcaacaccaccactgacaacgagggtgttgatgtcattcttgccattattgtgcggccgcagagtctccagagcgatgacagtgcgcgaggcaaggtgctcgaaacagacgcgcatggtttcccggcctagatcgacacgctctgcattcgatatcttaatattcgtaccgttactttgaatgatcctgccgaccgtgctcgaaatcgaagcaaagctgaactgcatatgccgcgtattcgcaaatggagtcgtaagataccagccccaatcgcttatgcgcttggctatttcttcaccccgagtctctggcggcgagtaatccgcaaaatcggccttgccgttagggaagacgaattgctctagattcttgccgtacatggtacttttagcttcttgaagcaaagaatcaggtagaatatctcgtgcagatttatccagtgcctctccaatagcgatatcgtcgctgttagcgagaatcctatgttctgtgaggccttccgaatgaaccagagtcgtatggccgccagaggcgagaatagacaagaaagggaattcgggcggtgtggatgggtcggccttgagttcatttcccaggcatgaaacgagtcggggtgtcaaaagatgtgcctgcatgtggtgcactccgaccatggggatctgccatgcaaccgacagcgcttttccagtgtcgaggccaacggacaggttagaccgcattccggggcctcttgtagcggatatgaaatcggggaggcggcgacaagtcccatctgccaatttaagtccatcgccagtttttgaccccggtaggtaattaagggctttctgtagaagctttgcgaggttggcttggtgggattcgagagcgatgatagggtgaattccgcgatgcgcgcgtgtgtcggccattacattttcgaggaaatgaattttggccgtgctcccggagtctttctttgttttctcaacgatagctactgatgtatcgtcactgttgttggcaaccaataattagttgagtgaccttctttttcgggtgttcatctccgcttaccatgacgtttcaattgccaacgtgagcaagccacggcgggaggctaaacatctccctgcatttagcgccgacctgcgaaaactcgcagcagggctcactgagaataacattggtaaaatgcttgacgtacgatcggtggcaggggcgaaaaagatcggaggcgcacgggccggagaagcccttgaatggagccctaaacaggtaccaaaatagccatctatagtgatcgagctacggagtacgtcccaaagaatcctacatacaacaacccaacagggattggttgggcggaagctaaggccggtatcttgctattggaatcgcgcatatatggctgaggatagttactattgtatttgcactaacgaacgactaggttaaacatttatactcaaaaatcaaaatcatcaatccagatcccatcataacgtcataaatatattgtttctccaaggcactgatacatcgagttcccttcagaatgtgcggcgcgcaccaaaccccagtcagcccagatgaatgatactgacgagttctgggccagcaaaaagcgcgaggcggcatagtcatccacagaaccatcttgcgaaggctggacggatacgttaatgcgcccttctgtcgtttcaattcgcagtttgaggacgtcgattgtcaggagcgctaggtgctccgtaaattgatccaacaaaagaaccggggtgtagggcgtagcatcattgcaagatgtagaccccgaatcattcagaagcacctggtcgctcccattactccagccgtgaaaggtcattaatgataaaaatctcgaacatgatctcactgccggaccgtccatcgccgctcttctcgtgacatcttcatgtgcttgccgtaatactcgtctggattctcaataggcgttacgcagtgaacagtcggtgtccctttgaattgtatacgcttgtcaacagtgccagcgcgagaggacgactgcttcttgaggatgctctttgatgaacaagagtttgtgtatgcataattcggaacctgcagtgaggaaaacctcttgctcgtcgggctcgccgcggagattggcgagacaggcgtgcgagggagagcacttggtgacttgagtgatagcgatggccgaggaacattctgcgcagcagagatgctcaaggatagctttggcttgacgacacgggcagtgtacattgtgacggatgaagaagtttagtacaacagtgcagttgatgttattgcgacttggttttcacggggaaactttgctcaacaaagatatccgagtaggcaaggagaggaacaaattattgacgtagatgtataaggagctgaagaacttgggccagccaaggcgaagagacaaaaatagaaaaataagaaaataagaaaataagaaaatctcaaacgatacggagtatgcaaaacagtctcctgggggggaaagagggcggctatatacacttgagggggagaggggaaccaaggaggactgccaaccaccttcttctgcctaagcgcctactctatgcacgacggtgcatatatcacaatcactatcactatcacgcccgagtttctaaacttagacaagccttcattccatgcagccaattaaattccccacggggtgcaactcccgtctaatgtgatgtgatggacgggctgtccaacatgccctgcagccaactgcacatggtcttccaccctggtcttcttccctggtcgtcctgtccatttgattcgaaactctcgaccgatgatcactcaataggtgagggatatcgcacttacataaagtggattcctgcattattcggtgatatccccgcattatcacagtggctggcagtcagcagcgaaatatgattggtttgaatcttggcaggattgttgtgacctactataattagatatcacatgggtttgatgccgctatcaactatttttactcgagattgagcgatgaatgatgtccatcaatccttcgatatagtagacgcagttgtaacatattggtcacatttcgtcttttggggagccaattgacctctagtcctgacaagataatgctcatctatgttacatttctcttgcgtgatcgtcctagtgactcgatttccttattttcaaatatagcacgtatctgtacggagtacgatgcaatgattgaatatgttttattaatagtgcatctacaaccaacgaagagtggttgacatgtatacatatggagtacgtactatacttactcggaaaacaccaggggaggaagagattggttatgacatgagcgactagctatccaaagtgggcgtatgacttgacctgataccaggtggttagaatgcaggacaagcacatgggacaaacatatatagaaaacacgtaaagcttggaataaatcactcactcgagctcctataagtttaggaaatagcatcctacggggggctcagtgttcggacatagcttgttatgaggatgaagctcttgtttgttcagatcagttaggatattgagctgtgatgggttgggataaatgcatcttgggaggagatgggcttgtagagatattgtagatcactatttgagttcatggttactatgaataactaaactcgaacaaaaattgacaatgtctttgttttccaaggtgtactccgtagaagtcttataaagaactcggagaagaagtggagcgtatgagcgacgacaatgctactgtatatgtactagatacggagcatgatttacaggggtatcttattgatccacctttgataaacaaaagagtccgccatttctcgaagatgttaacctcgggacatccataaaatgagtttaatatggccagctgggacttggaggttctatattataacagcctcggtagcactgccagatgtaagggcactcgctaggataacttgtattcctcgctatcttagatatagtaacccgctttcgaattgattgtttgtctcctctataccgcggatctgcaatcttgtatggagacatcgtctagaatccctccgggactgccggcaaacctttagctgtcaatcgtttctggagctccaaaggcttaagctcaagaaaaggaccctcaagaccgggagtcgcgggtgttatagctacaccgctacaccccactactgcaatgtatgtgctgatgatcctgatttataaatagaataaccgctgtcagtgagtccaacccttgcaattgagtttggtgaaagccggagatgtttagcatgaactatagcaatagctagaaagcatgccagaaagcatgcattatctgatcgattgcggagaaacaggggataacggtagtcacatcaacacccggactcggctcaactccggcaggcttgggaggagaggggaaaagacgagatgagccaatccaagtggaattctccaaattccttccccaccgcactccgcaccgaactcggagactttccttttcgtcttttcgtctttttgtcttttcgccttttcgtccacagactcaccggttccgaatgggccatgtgacaggatccggtttcttcctcatctgatccttctctttgaaagtcggctgcacgtctcgggtagtgtggtctagatcccgtgtatataccgtggctcatggcgagaaaccaaagggttcgcgaaccagaagtactagttgaggctaattcagggacacatttctatacataacatatactatgtagatatcgagatatccataatgtggagatcggtccaaggcgagactctccgatccgggtaaataacacgccataatgagaaaccccaagggatcgaaaaaaatcaaaaaaaaaaaaaaaaaatcaacgtggccacgacaacgaaaaggtattgttattagagaattaaaatatcaaatctatctagattacgaatagtcactcaaatattataagaaacaataaggaaactttgcagagtgggctccttatattaaagtatcataactttttctattgactcagtcctccctcttctccacatccctcgctcccttccttcccccagtttttctctttgtgcggccgattttttttttgtttagaactcaaaatcaacttggatatacacaatggccagcgtaacagaagctgtgaaggaatcgttcctgggccacaccgaggggcctcatctgtccttccaggcgcgctcaaacttcctccgccatgcgcaaaaggacgagaatggtgacctcttcatggatgaggagaacttcatcgatgccgtggcaccgaagcaggaagactatgtaagtatcaccacggactgcagaggtaccaaaatcttcgcaattgctcatctggtttcctaccgcggcagcacaagattaagcgcgaacaatatggcatccttttcagcgtcgcagaccgacggagagccggcaggctgaacattaccgactgggcctccttcgaaaacctcctcgcgaagcccgacgccgagtacgagatcgcctttcgtctcttcgacttcgatggatccggcactgtcaacttcgacacggtgcagggactgtacaacctgaacaagagtccggacagcattcccttcaactggagctcggagtgggcatcgctgtacggaggccgctcaaagtctcgccatgacatgacctacccccaattcgcccagatgctgcgcggtctgcagggtgagcgcatccgccaagctttccacatcttcgacaaggatggggatggctttatccagcccgaggaattccagcgtatcatcctcgagacctcaaaacacaaactctccgactacgtcctggagaacctccccaccctgtgcaatatctcgacgagcaaccgcatctcttacgccaatgtccgtgctttccagaatgtcatgcgcgagatggatatcattgatttggttgtccgcgaagcaatagagaagagctccgatggcaagatcacccgtaccgacttcctggacgaggccgctcgcgtgacccgtttctcgcagttcacacccatggaggccgatattctgttccacttcgctggcctggatgcgccttcgggacgtctctcgcagcgagactttgccaaggtcatcgatgcttcatggcgtatccccgtgatcgctgtaagccatgccatgactaccggagaggaagttgtcgagaagaccaagagtctgctgcacaacgttcttgagtcggctcaccactttgctttgggcagtatcgctggtgcttttggtgctttcatggtctaccccattgatttggtcaagacccgcctgcagaaccagcgttcgtctcgccccggcgagagactgtacaacaactccatcgattgcgctaggaaggttatccgcaacgagggtttcactggcttgtactccggtgtcattcctcagttgatcggtgtggcgcctgaaaaggctatcaagctgaccgtgaacgatctcgttcgtggccacttcacagacaaggaaaccaaccggatcaagtaccctcacgagcttctggctggtggaactgcgggtgcttgtcaagtcgtcttcacaaacccccttgagattgtgaagatccgtctgcaggtccagggtgaaatcgcaaagaacgtcgagggtacccctcgccgctcggctctctggattgtcaagaacctcggtttggtaggcctgtacaagggagctaccgcctgtcttctccgcgatgtgcccttctcggccatctacttccccacatacgcacacttgaagtccgacttcttcggcgaaaccgctacaaagaagctgggcgttgtccagctcctcaccgctggtgccatcgccggtatgcccgccgcctacctcaccaccccatgcgacgtcatcaagacccgtctgcaggtcgaagcccgtaagggtgaaaccaagtaccacggtctgcgccactgcgctgctaccgtctggaaagaagagggtctggctgccttcttcaagggtggacccgcccgtatcatgcgttcttcgccccagttcggtttcaccctcgccgcttacgaggtcctgcagaaaaccttccccatgcccggtgagggcgaagccattaccccgactggcttcgtcgagcctagtgtcggtgggcagggtgctaccgcgcccctgccttacctccgatcaaggaacgcgctcaagatcatccttgacctggatgagaactttggccgtgtgaagatcccacggcctgagaactggcccaacttcatgcggagctcgaagtagacaggcttgctgtatctagtgaacctgcgatttctagtctttgtttcttcatttttgttactagcgatatgtttcccatttctcatttggtcaaggcctacctttccctcgatttagcatgagatctttctcacatttcttttggattattttcctctccgccctcttcatggttcaattgggcttgatttgggacgtgcatccacgcccccctttgcatcatattgtcttctctttcttgtcggagaacacctgtgtttgcattgtaccaatagtagatagatttggaaagaaggtgtgtgggttgtattagaggccctggttgtggtggttctatcaatctagatctggtccgagttgttattctccggtttgtgtggatggaagcgtagatatatatatggccggatgtggttcgtggttgatataagttatgcctagagagcagatagatcctgtctagagcaacggaatatttggctgcatttgtattgcagtatttaaattttattgatttggagttatctatctggaaaatatgtacatgaagcatgatttgcaagttcgcaaacgggtatcggaatctactctcaaggaaagattccctgtacagatgatgttacatttatatcctcgaggatatatcggtcatggactggggccatgtgtgggaaatgccaaacccaattgtcgtggatagaggggaatcctatcgtgatctagaagatcaattcgacatcttaagccggcagcggcctaatggggtagtgtataccccgagttcacaaggccgatgctcaagaccagaggcacattctcgatgaagaccaaagtagtccccattcaatagaatctaagctttcgtgtcggctctgtcttaggaacctcatcggtgcctttgccttccgaagactgtgcgggctgcttttgttctttctcgggctcctggcgcttctctgcttgtgtctgggcggtcttcttctcatgccatagggaatcttcggcttcaatctcgcgcagcactagatagaaatagtcagacaccagccctcaaaatatagttggatattggctaacacaccctcatcccactctcgttcctttgcctcatcgcccgttcccagtaacttctcaacatcgaccttctctccattcttgactcgtgcaataatctccgctagaagttcgatcttcgcatccgtcgtccgagtatacgccgcatagccgttcttcaaggtgagcatgcgaatggcttgcgacccgatcagggtaaacatgatgatgtagaacgtcgccgggttccattccttggatttctctttcgcaggatccttgcgcgccctgccaccccgaagaaatcggggaatcattgccgtccatactgacgtgtctgcgatcttcggaaggcgatcggaggtcgaatatgagcgccgagtcggggcgcggcattgtctggtagcatttgacgtagaaggagcagaaaatatctgtctgctgagcccaaagggcttgaatctgaaagccataacctgttcgcgtctagcagcaactgtcggttctcagaagcgggaaaagttgaggtcgtggttgcctgaggcgataaggctatcaacgccaaatacggtatagcgcagttgttgctgcgacaaccccccgtttacagtccggccgatagcgattgcacatcaaaggcttgacgcgagcgatgacctcagtcctgcagcttcaatagaacgaccgaaaaaatggcggtcaccgtcttaccgtcaagctctctaacagagtccgtgaaacaggccctccgctcaacgacaacatgctcggacgctaccgtgttgtccctccaaacactcctccgcgggtcgccaaagatgcccgagaaacccacgaaacgcacaaaatccacaagagatccagtcgcggcgccgagccgaacgagaaattcccgcgcgacaaagacgaaacctgcaaatgatgctacgctccaatcattcgccgatcacgatgcggcggcgttgtcgtgtcaggagaaactggtctttgctacagaggtattcaacgccacgttaaagaccctcacggacgccgcgaaactatctacagccaagcgccagaataatacatccgacattgccaatgggcccgacgcaggaatcgtctcggctgcggagtgtgcgagactttctttgtccacactgcgcactctcaagaatgatgctgggaatgacctgttcccgaacatgcagctcgaacaggggctgtgtgttcttgcgggaaagcttatttcgctgggactgaacgacatggcatataaagagcttcgacttttgaagcggagaatccaacaacatttggatcgcggaaaggccgggaagaagaccacagaagcaaaggatgtggtggaagaagaatcttcgaaggaaagaatgtcggatctcttgacgtttgctcacatctcgaacgcaaagtcgctatacgccttgcttgttccctttcactcgaatgtgatgcgcctatttgctgcggataaaagagcctccacgatccaaaaggcttgctcttcattgcaactttctgatgcgagtagtcctgctcaagttattttggctgccttgaaatcaggccaactatcaaatgacaaagctgctctccaactccagctattatcgaataccgttctatcgctttgctcggggacatttttctcgaaggatgaggcctcgaatggcttgaagccaatgacctcattggcccttcaattactttccctcgaggttcgatgtttgggctggaagttgtccggtcatgtctatgatgagagcaaagaagtatttgatcctttgcttcgctattttggtagcttttctcaccggagcaagggtattgacaaagctgagtttgcttcaatttacaaaaccgttacccggttgcaaacatccattgcagaggtcaagaagaagtattcagaaacacaaaacgccaaccaggctgccaagctcatgactattctcgggcagcttgctttcgacgcgggttgttttgatgagtctatgaagctgttcacggaagccatcaatccgctttcaaaaacccagtctctttcgctcgcaacagttcggtgtaaaattgcatctgttcattttcaggcttcgaatacatcaaaaaagttcctgaacggagctttggattctgtgtcagaggcgactcaatccctaggattgcaattaagaggcagcgcaaacgatctagatgaactgctggtggaagctgcaagactgaagaagctggctcttgcgtggttcggagaggctattacaaaaggttctgagagcgaaagcgcgaaaaacgaagttgctagtcaaatcagggaatatctgcaagcgtttatcaggtttctcagacgctttgttggacgccaaccaacagaagacagcgacgaaaatgagatcgagatgttcaacaaacgcatttcaatttctagaagcatcattctaactgccattgactctactgtcgcaatcgggaaactttctatcatgtctcagaggccaccttgggaagacatgcttccaattctggctgatagccatcgcctgctctcgaccatcgaaaccaccgatgaaaataatacagagatatcagaaggcctagggatggcacttgtgaagctttcaaacttgttctggtctcgatacatcaaggaaaaagaggccggacagggttatcgagacctcataccccttctcaaacaatctgtccagctactttcaagttgttcgcctcctcaacgcaacacggcatttgcagctctcaagttcgagagactggctcatctttacatcgagggcaacatgtacattgaatcagagcaaatgttccgaaaatcgattgaagaatacatactctctggcaccctagaccagattgctaagagcagcggaggacagaatccaagttcgctcaatctggatcctaagagccctggtttcatgcttggccgtgtattttctgcccttctgaagatgaagctgcgcaggaagggatcccacccgtccgttgtctatgatgatgttgaactagaattcgaacagagatgtcttcttattgaatggcagatgagtttgcttgttgaaatgcctggttattcttcaaatgaagaagagtttcgcttgattctcggctcagctgtttcttcactcctcgatctctacccctttgacgtctatcctattcgccgttctcgtgtgattctctctgccttgcggcttctattggagcagcccactgccttggattcgtctttgattcaatccctgctggatgcaggagcagaggctttggataccggcttacaggtccgagaagatgtcgatcttgcttcatttgcaatccacattaacaactcattgcgcgttatcattggcttccaccgtggcaagatcgatgcaagcgaattagacgacacgcttgcgtcgtggaactcgttggcgtcccagtcccatgactggaaaacattgctgctctgcatcaatgacacggactactgggtcctgcagctgaaggccctagttgattataccgaaatccacgggctttggaaggctcagctatgcaccctggaacttatattgcgtgccgcggagctccagcaatcaggggatctgtcagacgctatcataattctgtcgcgcttggtactgcagaattgccgtctgggctactgccagaaggcaggtgaactgctatcgcgtggtgagcagtatcttgcgcaaaccaaggtttcttctcttgctaccatttcctataaagtcgcacgggtggaatatcttctagagaccggagagatcgagaaagccgccgccgttctttcagcagcccgctcactgtacgaaaaatgccaaaggtcagaactaagcagcttgactgtcctgtcgaagatctcatgggaaagactggtagcagatgctgcctttgttcagtccaggttgttctccgtacagggctcagcgacccaagctctgtacttcgcaaagttgtctgtaaggctcaactgccgcatatgggccaaggttgagagactcgcccaaagaaagcaagacaagctcttgcctgcttcagggaattctgatgttgaggctgttgctgatggtatagcaaagcttgatttgtctcagaatgggtgttccccggatgtgtctgccagctacatccaaggtgcgcctttctggcctcacctaggttctcaccatacctgcttgttgaacctcgccactttatctgcccaccatggcttgttccaggatgctatctattacggcgaacaagcgctgaagattgacaagacccttgatgccaatgtacggctactggcggcgcagacccagctcggttgccattggattcttagtggccacatgaacgagggtcaggatcatctctctgcagcggccgaatcttctaaacaatcccagaacagtattgaaacggtgtcttttcaaatggcccttgcgtctctgtacaaggcgcaaggtgcacatgacaaggcattgcgcgttctccttgaagcagataaaatcatcacagcggtcacctgtgccgatatgactgctaatctggagatgtcaggcatggcagaaatcgaagaaaagatggacaagttacgggttagagcaaccagccggcgaactccaacacctcgaaccccgacacctacggctagtactactcggcggacacgtgcaaccagttccgctgctcccaaaaccccaaagaaagctccagctccaaaatcaattctcccggacgttcaatctcaatccctattacaacttaaaggcaacatccttcgacagcaagctgattgcctgcggaagttgcgtgactttgagcgatctgcgcaaacacttgcagaggctagacaatttgccgtggcccgagaaagcaagatcactctggagatcggtgaaagcgagcacctgttggctgatgcaattcgccgctttgccagccatgctgtgtactgcgtcttacccgaatctacaatctcgctgccgtcactcaaaacaccaagcaagacggcagaggagcctaatttacccccggcaagaccgacaaggagaacgagagctcccgccaaaacaacgcgcactaaggctcaacgagccagtgatgacttttcggttatgctgtctaaggcgagcgattgtcttgccagtgttttctccgatgccacaattctaggctcgacgcttgacagccatgcggcatctcgcttgatgagtcggatctctatgctatcacatgcgacttcccctggaataccaacggctctggcccagtcgcccgcaaatatgaatggtaagttttgcgaggtcctttctggttgacggatatctgacttttcaattagagattggacgtgttggcgcatttgcccgggagcgcatggcgattgatatcgatcgacagttggccgattttgccgaccctcttctttggccaacctcgttcccttcagcggtcgagcttgacaatgatctttgctccaactttacacgagattatgtcgacattctgcccgagacttggaatgttctttctttgtcattgagtgcagaccataccgaatttgtggtttctcgactccaaaaagaccgctcgccattccttctgcgccttcccctccaccgaggaaattcagaagatgatgatgaagagcaatttacctttgaggacggaaaggaggaaatgcaagaactcattaagctcgccaacgaaagtgcacatgcagccaaggcccagacggacaagttgtcgaagaaggaatggtggaagacccgcgaagcgctcgatcgtcggatggaaaatgtacttcaaaatattgagaacatatggtttggagggttccgcggtgtgttttcgcctctgtcacgggatactaccgcgctggtccggttcgcaagcaccttccaaagcatccttgacaagcatcttccttctcggcaaaagggtggcaaggccgctggcccccgactcacactacatcagaatgtggtggacttgttcattgggcttcgcgatcttgaagaacaagaggagcccgaggacacgctgatggatcttctttactttgtcgttgatatcctacaattccagggcgagcgcaatgcctacgacgagattgacttcgatatgatggtcgtagataccctcgatgccttgcgagggtatcatgaagctgcgcgcgatgaacttgcagcacggccgccgagacatacaatcctcgtgctcgataaagctctccacctattcccatgggagtcacttccctgtctccaaggataccctgtttgtcgcgtcccatccctcgaatgcctcagggaccgagttcttcaattccgcgaggcatcctccggagccattgtggaccgcaactctggtggatttgtcctcaacccaacaggcgacctgcacacaacgcaaaaaacgtttgaacaagatctctcccggttcaaatcctggactgcaattgtgcagcgcgaaccaactgaagatgaattccgcgacgtactggaaaagaaaggcctattcctgtacttcggccacggcagcggcgcgcagtacatccgcggccgcacgatcaagcggctcacgcaatgtgctgttactttcctcatgggatgtagcagcggcactttgaccgaagccggcgagtatgagccctacgggacgccgatgaattatctccatgcaggcagccccgcgctcgtggctacgctgtgggatgtcacggatcgggacattgaccggtttaccacgactgcctttgacgcttggggtctggtcgaaaagaaggataaaaaggataagagccgaggggaggatgttgggcttgacacggcaattgcgcgctcgaggggtgcgtgtgtgttgaggtatctcaacggcgcagcgcctgtggtttatggagttccggtgtttttggagtgaattgagttcatgtttctctcttattttgtatatatacctggcgttttctccactgtgggcagcaatctgatttgactcttcatgctcgacctttcaatgggttattgttaatatatatgtccatctgttatggtatatcctatctaaggtgcagttaatagactagacaatgtccaatgcagtagctctaaaccctgacatcgaatatcatctagatacatagactatctatatactcctgtaaaatctataaaatccgaaataggaagaattatcctatcgaggtggacctcttttcccctcatgcgggacacattccccccaccttaaaacgtcaacgtctcccggctcgtagctttctgttctctttcttttctccttctaacattggaagatacatcaaaatgtccgtcaccacaaacgcaaccatcgcctccttcggtggcaagctcttaaagctaagccatgccgccacaaccacaaaatgcgagatgaaattcaacctcttcttgcccccgcaggcccagacacagaaagtccctgtactgatctacctctccggtctgacctgcaccgccgataactgctccgagaagggctttttccagcacagcgccagcaagaagggaattgctgtgctgtaccctgataccagcccacgtatgtgtcttctgttttatcgcgtgaattttccatatacctttctatcaattgaagtcatacggttgaaaagtaaagaattatataattaacatgctcatcttctaggcggcctcaacatccaaggcgaggacgatgcatacgacttcggctccggcgccggcttctacgtcgacgccaccaaagccccctacaacgccggctataacatgtatagctatgtcaccaatgaattgccacagaccgtctttgctgctttcccgcagttggatgccagccgtgttagtattactggccacagtatgggcggacacggtgctctcactttggtaagttatacactgcggcacaaaagctggaaagaatatcttgtattggagtaatatttatctaaccattcatcagttcctccgtaacccaggcaagtacaagtccgtctctgccttcgcgccgatcacgaacccgacgaactgcccctggggccagaaggcgttcaagggctacttcggcgatgatcagcaggataagtggaaggagcacgatgctaccgagttgattaagaagtggagtgggggtccgctggatatcctgattgatgtggtgagttatctcctccctttcttctgtgtatcgtaacacgtctaacctatatacagggcaccggcgacaacttctacaaacaaggccagctgctcccggagaacttcgaggccgcagcccgtgacgctggaatcgccggcttgaatgttcgctaccagcctgactatgaccactcctattataccatggctacctttgcggatgaccatgttgagcatgcggccaagtatctctttgcatagtgtgtgctctcttcttaactcctaatctcaaaaccattatgttttacttcttgtcttgcgtatttcttagtaaacgggatctgattggtttttcttttggctcaagtgggctacaggctgttcggtcgatgatctagatggtgtgagaaccgaatgagaaggtattattatgctatggatagtgcaatcatcttgcaatgctaactcaaggttaccttatgctacacattttgccggggtatgagtgacttacatcgaactttcctgaaatagctttgatgtttcgctcaagaactagttccgtaggcttgcagatcccaaagccttctggtataccgatccagctagttgggatggtgttctcgttgaaaatggggcgtattgcgtggattccaccttggccttcaataaccgtaaatcctatcagttgctcaccgtagaaattgagtgtgacggaaccccctggtagccgataccccaaaagtacatttggcctttcgggatctgcattcagcaggtcgaagccagtaatataggtctctgctccctcacgttggatagagactgctaagccgttgatagagctttctaatagaacgacttgagaaaagagcttatgttctgcccagcaaatgcggcattcattctcttttcccccatgtctgttttctggtctgctgtctctatcgcatcggaactcagtagaaacctccttccagcataactcattaagtaacccctggttcgagacaatatgctcgtccgacgttctgatcatagaacatctttctattagccatcggttatttctccaccgtcgccgtgttgcccagaggtgctcatcacaccgatcgatccttgctgtacagcggtatatgagtcgccagtttttgctctcacgttttctgggattttctgctaggcagttcagaaatccacgatctccattctgtgaaaatcttgacttccagaatgattcaattccgaacacaactgccattgctcgggatgattgccgtagtcttaggaagtcagcagtacgaagataagttgcgatttgaactcgtatctcgagaggcaggatgctaaagcagtcagagtcatgcacaactctactcttcgagccagagtgctttcgtcttttcggcatcttcgggaattgtctcgcagcatcttgaagtcccttgataatgggtcgttttgcagggcgaaaatgatgccgcaatccgagatccccgcagttgtctaggtctgttaaaaaagccggcaccaatattgccatggccacttactccaatagtctcgtcttcccggaggaggaatttccttacagacttcaaaaagcctgtttaaatcaatatcctccccttcaaattgctggaccaagagagaccagcagctctcatggactaagaaagccttgtggggcttttctatgtgcatgaaataccaagattcaagtttattaggatcaccgaacgcttcttcaaccacccagtcaaacttggttttattaacacctgacagttggattccgcttctggtccgatatactatggtggatgagcccggtgcaagaagtgtacttataacatagggatcaaactcacatactcggtaccttgccatccaaggagcctcagggcaaatagttgctgcgcaagatacacagtgactggaataatcagaatcactgttctccgtaagtaagctcatctggaaaaatttgagaaggacaatctgatgtgggggcagagatctataaatatgccaatctgtagaggggtcactatgacctcagtctatctatactcacttagaatgaccttattgaagataacatgacaggagaactgcagtcgaatcatctccttagataatagcccagagagcaatactaataagatagttagaagattagaagtctgacatgtgtcttccttaaattcaaacgagtgatatttgtctctgattatatttcatcccttatcacccttggaatcgtctctccttaataagtgagctcgatttactcacttcgctttattgaaacaagtgttcttccatcgctacacctatcaagcctcattggctctcgtgtccactatactgctctattgctaaacagaggctttttgttattcgtcaataagttttttcctctgcaatacccgactctaagatattgtttctcttctttctactaaatcagtagattcgacaaagaattacatcaaacagttacaagatccacttgtattgcaaggaggcgcttggcctaatgaggttagtataggtgattacctaagcaggctaaaattcacgatgtcctcggtagcctcaggcatagacgctaacctattttggctaaaatggcctccctacggcgcgccgcaacgcgaactccagaaaccaaaatcacaaagctttcaacccaactcgacctcaactctcaactacctttctcatctgctttccagtcattttacacctcttttctctgcattctatcctctcaactgctgcaattttacatacacaagctccattatgtaagatttttcgcagcggttcccgtgtctggcactgaccatcctacagggagagcttcgacaacatctacttagacctttcaaagcaacctggaaaatgcaagcttgctgaaagtggtctgggctggcgtccgtctggtggtggcgatactttcacgctcgacagcagcaacatcggtgcagcccagtggagtcgcgctgcgaaaggctttgagctgaaaatcctgtcgcgatcgtctggagtgatccaactggatggattcgaccaagaggtatactacaccgaacattttgcgaccattggcctacagactgacaaccgaaaaggacttggagcgactgagcaaagcatttaagatttggtacggcattaacgtggagacccgtgagcacgctctgcggggatggaactggggcaaggcagaattcacaaaggcagagctggcctttaacgtccaaaaccgacccgccttcgagattccttattccgaaatttcaaacaccaatttggctggaagaaatgaggtcgccgttgaatttgccctccctaccggcgacggaaacgatgccgtgacaaagcccggaagcacaaagaaccggggccgcaaggctgctgcaggccccgacgagctcgttgaaatgcgattctacattcccggaacggccgtaaagaacgacaaggcggaaggcgctgaaggcgaggaagaagataacgaggaagaggccgaggaacagaatgctgcaaatctcttctacgagacgcttatggacaaggccgagattggagacgttgccggcgatacctttgccaccttcctggatgttcttcacctcacgcccagaggtcgcttcgatattgacatgtacgaatcatccttccggttgcgcggaaagacatacgactacaagattcaatattcggccattaagaaattcttcctccttcctaagaatgacgatacccacactcttattgtgcttggtcttgatccccctctgcgacagggtcagacccgttatccttttttggttatgcagctgaagctggacgaagaaattagtcttgagatgaacatgacagagtcggtttccctgcacctactctattttacccactaacaaccttttagggatatcctgaaaggccagtacaaggacaggttgcaggcgcactatgaagagccaatccaccaagtcgtcaccaaggtcttccgtggcttatctggaaagaaggtcattatgccttccaaggatttctccaggtcagtaactgccagcttatatttgcaacacccccgaagcccgtcgctaacattcccatagccaccacggtcaccaaggcgttaagtgctcaatcaaggccaacgagggtctactgtatttcctggataagagtttgatgttcgttcctaagcccgcgacctacattcagatggagaacatcgcgattgtcacaatgtcacgtgtcggaggcgctgtttctgccagccgaactttcgacatcactgtgagcctgaaggggggcttaggtgagcaccaatttagcaacatcaaccggtaagtacccgacattttcctgtttcctggaatattctgacatgaacagcgaggagcaaaaatccctcgaggactttttcaaggccaagaacatccgcatcaagaacgagatggcagaagaggtatgtgaatcctgtttccctggtatgttgttaccgctgctaattatttcctaggctgctggacttatcgctgctgctcttgataatgatgccatgggctccagcgacgatgaagtacgacccgaccgcgggtcagcagatgaggatgagtcgtcagttgacgaagactttgctggttcttcagaatctgatgtggccgaggaatttgactcggatcacgagagtagtggtgatagcgatgaagagatgggcgatgcttccgatggaggagacgacaaaccggaggatgagcgaccgaagaagaagacgaagacagctaattagatgtacggctaggtttttcgttttctttcaaaatatccaagtctcttctagtaatacaccattctataactataggatgttactccgtatgttcctgactagtggacctcacgtgagctggtgattggcggaccaattctggggcttgttaacccctgatctcaggagaagagatatctggcaagtacacaagtaagtatacatgtacatttatgtgagtggattctgagcagtcctcgccaatagaaatctccccttgctagtcagaaatagaaatgcagtccgattgcttagaactaaagtgcagttacgagcaatttgcgggtttctacaatgtaccgaagtaaacagagtagaaaagacccgaaatatagatcaaataggagcaattcaagcagataaatagaagaaagataaaaaaataatccaatatatgagagataccagtccaaagccagaatggtaagaattgtatacttatcgaacacatcaggtgtttctacgcgggtcgatccaagccaactccagaatagctgggctccccccgacaacctctcccccctttctttcccagactggcagagtcaacctccttctctccatcctccttgttcatctttcgcttcatttcttccttctcctcttcttttcttttcctcgtctctcgcttctggtcaatttactccaaccccccccccccttttnnnnnnnnnnnnnnnnnnnnnnnnnnnnnnnnnnnnnnnnnnnnnnnnnnnnnnnnnnnnnnnnnnnnnnnnnnnnnnnnnnnnnnnnnnnnnnnnnnnnnnnnnnnnnnnnnnnnnnnnnnnnnnnnnnnnnnnnnnnnnnnnnnnnnnnnnnnnnnnnnnnnnnnnnnnnnnnnnnnnnnnnnnnnnnnnnnnnnnnnnnnnnnnnnnnnnnnnnnnnnnnnnnnnnnnnnnnnnnnnnnnnnnnnnnnnnnnnnnnnnccacccccccccccccctttttttttggaaacaattccaggtacattccctctgctccccgattttttttcccctatcgcgacaattcgaccccactgaagattaggagaggtgactgacgacatttatcatctaggggatcttaattcagttttacatatcctaaatccccggctttcgcaatgtgtaagctatcccacccgtgatgagacagataatctcgaggctcttccaagacaagatactgataggtctttgaagcttcgccacctgcgagcagctcccccgtcgcgtctcccgtcgcatcgagggactctcctactcccaacaacggcacggagtcgcctttcgtcgagcgcagcaaccctatgggctctggtatcgcccagaccgtcagctcccgcgatcccaaggccgcagctcaggccgccaccgacatgaagaacgtggtccgccgcaagctgactggctacgtcggtttcgccaacctgcccaaccagtggcatcgcaagagtgtccgtaaaggcttcaacttcaatgtcatggttgtcggtaagttggacagataatatttccatggaccaagctcatatccatcaggtgaatctggtctcggaaagtccaccctcgtgaacaccctgttcaacacctcgctctaccccccgaaggagcgcaccggtcctaatgccgatatcatccccaagaccgtgtctatccaatcgaccagcgccgacattgaagagaatggtgtgcgtctccgcctgagtgtgattgatacccccggattcggtgactttgtcaacaacgatgactcctggcgcccgattgtcgagaacatcgagcagcgatacgacacctacctggaggccgagaacaaggtcaaccgcagtaacattgtcgacaaccgcatccatgcgtgtgtctacttcatccagcctactggccactccctgaagcctctggatatcgaggtgatgcgccgcctgcacaccaaggtcaacttaatccccgtcattgccaaggccgataccttgaccgacgatgaggttgcccttttcaagcagcgtgtaagtttttgggattccctttctgaatcgattgaagctgtgcatactgactcttctagatccttgccgatatcgaacaacactccctccagatcttcgaaggcccccgctacgagcttgacgacgaggagaccattgctgagaaccaggagatcatgtccaaggttccctttgctgttgttggtgccaactccgaggtcaccactgctgacggtcgtcgtgtccgtggccgtagctacccctggggtatcatcgaggtcgacaacgaggagcactgtgactttgtcaagctgcgccagatgctgatccgtacccacatggaagaactcaaggagcacacgaacaacttcttgtacgagaactaccggtccgagaagctcacccttatgggtgttgcccaggaccccagcgtcttcaaggaggtcaaccctgccgtcaagcaggaggaggagcgtgccctgcacgagcagaagctggccaagatggaagccgaaatgaagatggtcttccagcagaaggtcgccgaaaaagaaagcaagctcaaacagagcgaagacgaactctatgcccgacatcgcgagatgaaggatcagctagatcgccagcgtggagaactcgaggagaagaagggtcgcctcgagactggacggcccgtcgaagagaagggcaagcgaaagggcttctctcttcgctaatgtccatgtccctgccattgcttttgcttctgcctatacttttggcaactgatcctactctcgttccattttttcccttacacttgtcacccatcacactcccttaccatcccataacgcaactgcttactctggatgggtccacgcaccgaaaaaagaatgggggtttttcttcttaccgattgattgataatacgatcctgcgagggtcagcctgggacctttcacttcttgtgatgtactttttgctacgccatatcttgtcttgccgcttttctgtgtgccctattacccgctcatttcattattttcttagtgtttgggacatttggttgttcgccgcctgtccgtgtgttagtcaattcagcgcttttagctttagattttgcagttcgagtaaacagtaagcagcaacagtatcaagctaactaattaagaaggggaagagaatcggaaaataatctcaaggggtaagatgattctcctaataagattccttccgtttcctgagtttatattagttaggcccaagcagtaagcatacaatatattcaacctgaaatctcccagacctaggtgtcagatctggatgaaacaagtacaacattaataccttttctatcaagtataacatccttcaaagtccctacctctgttatgacccaaaatatatacctatggacctacaacctatatactacacctcctagtatagattatacagacatatcaactatgtcaattatgtcatctaatggaccgcaacggaactaatcatctagaacgtactccgtatgccccagaggcatgcgtagatcgtggagtctaattctatatttaagcgaaacaacacggggctctggagcatttctgcgacaaaacattgggacccgcttggtgatttagctcaacattgtacatagtattctaagactatattaatccatatcgaggtacctatacaatatagacgagtacattgtagataggtatggaaagaattgacattagggaatactttggtatcaaaagggacttcaaggggatgtgacttcacagacaataagggcagtgctaaatactatgtattttgtatgtatactccgtacatgatcgtcattaccggcaaattagtcgtacgacggagattccccttgcccttataattgtgaacagactattatacgcataaacctgaggatgtattggacctacaatcgaagcctcaattgcagccgttccctttccatcagtacttaatactattcttgtcaacaacatcaggacctttgatatcacacatccactgtctatagggctccactatttaaacgggaggctggcaatcgccctcctcattggttgttcgtgagctgtgaggtgcattagcgtggtggtccttgtatttttaatttgggaggtgtatggaggtgtaatttgaagtatcgccgtttcaatttcgaaaacaagctgggccttcccctgggttcccttcaccttcatattcagtcattcgttgttattcaaatgcagtgaggcttcagtctcgagcatgattcattcatttacattcctttgcttttaagctcttttttcccatgccacattccttatcaattttcttttctccacgcgttgcggcctgacggcctccctgaattccttagactgcacaaccctgtctagtcttcccacactcgcttcagccatttcagccatttcaactggccaactacactcctattgcccgtcgtcgctcccactacaatgaggatctcttcattgtttgggcccgcgacggccggctggccctcgctcctcgcgcttttaccgactctcaacgccctgtcattcgagtcagtctccatcccggaactggacctcagctcgctgggacgggtatcaatcactggtgatttcgatggcgtttctctctatcaatataaggaacagaccgaatcgattcccgatggcacccaaggtcttctgaccccgctaccgaacggcattctcacgaatctctcgtccaccaatgcgcatatcatggcaatgtgcccctttaccaaaaaggatggatctttcgcaggtatatttgttgggggtaacttcaccagcctaggcggagtagactcgcccggtgctgctctcttcgacccgaataccagcaaagttactgccttaccgggcctttcgggctcggtagcggccgtgacttgcgatcaggacactaaccgcgtctacattggaggaaaattcacccacgacaacacgacgaacgccatcgcgtgggcgcccgacaatggctggactaacctcccgttcaatggcctgaatggccctgtcagctcgattttgaaagctgacaacggccatatcatctttggaggatcattcgatgccctgggaaacagcacgagcaacagcacccgcaacagcaccagctcctcaaacgaaagacaaatcctcaaccttcaaaatgcgaccgtcacatccgatgcagactcttccttggacggctactccgatcctcgtaacatcatttgctcgacaaccggggtggcggccaaaggcaagacctatcttctacacgactatgcgccgggattttggagagcagacctcgggttcgacttttttccgactaaaattcgcctgtacaacactcacttagatggacgcggcaccaaggactttttacttcgagcgctccccgacactggtatcatgaatctgacttacatcgacgagtcaggaaaaaagaccagctgtgactcgtcctgcccgctttccagcagcacgaatgaaacctaccgtgaatttaccatggtcaatcccgttggtatgcgaggattccagattgaggtgcttagttggtacggacaaggagctggcctgaacggcattgaggtcttccaggaccaaatcctcacatacgctgtcgatcaatacaatgaaccaacatgctcaggcattgaataccccgccaagtcaacgcgcactggctcttggactgtcgagtctgggtatgtgtctgcgaaggtgaccaactctaatgcctcgaccacatccgtcacatttgagcctgacgtgaaagagtctggcaactataccatcaagttatatactcccggctgtacccaggacaactcttgcagctcacggggtattgttaatgtcacggctacactcacgaatggatctgactctagccagcccgatccgtcatatttttaccagaccaacctacacgacaagtatgacacattctacactgggtatgttgatgccaacagtgactccttccgaccaaaggttacggtgcgggccaaggacggccaaggagatatcaccattgtggcgtctcgtgtccgttttgaactactttccagcaataagagcaccaaaagcaccaagagcactaagagcaccgggggtctcaatggattatacgattatgatccgaccgcaaacactactgaaacttcaaatcttacaaagtccgacattaacaaggcggggacttcactcgaccataacgcaaccatctcaataatgaaggagcatgatgatgtgatctatgtcgctggcaacttctctgacagcaagatccaccacgtcatgtcgatcacggatggcaatgtcacagcaatgcccggctctggtttgaactctccagtactagcaatggccacccttgacaatttcctgtatgttggaggtcgcttcaccgatacctcagacgcaggttcaacgggccttcaacacgttgcggcatactcatactcttccaaagaatggtcggccctgggagcagggctgaacggtcctgtcaattcgatttggcctgttggattgaatgcatcaactgctatcaatgaaaccatccttgctgtgagcggcgactttgaccagatcattgctttcaacgggaatcccgcggtatctgttgctgggttcgccatatgggtcccctcccgtaaggactggctccagaaccttaatgttacacagatgcagttcggtggtcaactctcaagtgtcgcttcgcacaacaatacgctcatcttggcaggtgaccttgccaccaatggtatcatcgctggtggtgcggtgtcactgctaaatcccgatgatttgcaactgattcctctgtcgatgaagatcaaccacaaaaattcaagcactggtctgatcaccggtgcttatgataccagttcgaaccgcaatctcacgatctacggtggacatttcgctgccgctggcagcaatggatcaaccattgaaaatattgccatcctcaacggcaccgatgagaagatatcaggtctgccgcaaggcgtcgacagtaactcaacgtttatttcaatgcttgtgtacaacgacaccctctatgcaggtggaaatgttaccggaaacatcggtcgcaccagtctgcggggtcttgtggtttacgacctggaaaagaaagagttcgcacagactcagtcggctttctcgggctggaatgtctcagtcaatgctgtcgtcaatcgaccggattcatctgatatctactttggaggaaacttcgaaggtgtagggcagttcccatgtaattctgtctgctatgtggatgccaccaccggggaatgggatcaacctggctcgtccctaagtggtaccgtgattgaccttcactgggccagtcaaaagacgctgatggctgtgggcgaccttcaggtcggtggtaacaagacctcaattgctctctacaacgcgaaatccgaaacatggtcctctttctctggagcatccgagtcagatttgcccggaaatgtcactacgtttactgctgctagctcggatttgtcaaagttctggatcggaggtactgcggccaatggctcggccttcttcttgagctacgatggttccgagttcctatcccccggtaaccttttctccgagggcacggtcattcgtggtttagagattctccctgtcagccacgaccattctgcggctgctctgttgaataacgatcagactttgttgatcatgggttcgcttgtgatcccgaacttcggacatgcatcagcggcgctctacaacggaaccgatatcactccatttatcctttcccagcaagccgatggccgaccgggcagcatgtcgaagttcttatccgagaacaaaaacccttacactaccaccagtgagtttacttcacctttcgttcttgacaggaatcaatactgactttgacaacctagcaaaacatcactccaatggcatcgcagtcttggtggctttctgctgtgctctgggctgcgtcttcctcatcgtcctagccggtgtcatccttaataaggtacagcgccgccgccagggctacgcagctgcccctcaaaccttcggcaccgatcgaccatccgacatgcagcgcctgccgcctgagtatctcttcaactcgctgcaccatcccaaccctggtgccccggtcctttaatgccccttttcgctccaaaacccttgaccttcgaggccggcgtttcgtttcgtttttgttctgttctgttcttttctgttttgtttcgttttatcttaagcaacgttgctatacccaaccgtctttaatgtctgtgtttgttttcgcgccggccatatcgcgatttatcttcaaattcttttatttcctggctcctggcacatgtggccgatacagtttatcaaagctcctttgtgaatatgtctgtgttgatgtaccatatgctttccagcgatttatatcttacttgagtggatgtgtgttgctagggaggttggagatgtgtagatagccacgcttcgttcgtggacacgacaattaatacaatacccctttgctgatggaaatattctcaatagacatgtaactatagttattactatgctatgctaggtagcaatgtctaattatatccaaacgcataggcccattctcctttaatctacacctgagcacctgacttcgggagcacagcctgtctgagtcaggttatttgtgtgggggccccaggtcacctgttccctccccgcaggttgatctccaggttttcgtttccccaacccgatcactttctttatttcgcatgttgctaccgcatcgccttcatgtaatatcggtatgcgatcacgaaccggctggtaagtgcatatccaactagcgtgatacatggctaacacaacctagcttaacgtgtcgaacacgaaagcttaaatgtaggaatcggttctcccggccgtttcattgtctggtgactaaattaatttataggtgatgaagaaaagcccgaatgttcacaatgtcgcaaaggtggccgagaatgtcgcccgagcgaaggagtggttttccgccatcaacagaacgcctcgatgaaccggaactccccagacggtcggggtagtctcaacgggttctattcatataagaacacctttgacaaggatagcgtttggctggatgttcccaaacatggtacggcaccaatgggacatgttgtttgggtctggaccctttttggacggtagctcatatcctctgcagtgatctttgtcgacaactccgatccatacgccgacgacctcgaggcctcattactagacccgggcagcgcagcgcaaacaaactctccgaatcacagatgggacagtggaggccctcgagcgagcgatgccgagacacaggggttggaagccttgtcggcggtcgcaacacacgatcgcttcccttattctcccttggaccattcgatctctgatagtacctcctatacctccccaaacccgcaacggagtgctgctatcaccccggcttcaccctcaatatcgctgtcgtccaccagcaataataccaacattaatttcctcctcaaccccgcgcattcgatgtccccatccatcgacccaagtatgcagctatctgaccggaacaatgcgcttccatcaagaccggcagcttcacaaagaagcatgagccacatgagtcacatgagccttgtcaatcacacaacagacgacaattcagagaccgatttcgagaccgctttccttctgcggcattactcagaaggaccgggactgtggtatgtttccttccagctgttaacgtggaaccatcagtaataatgatatctgcaggatggatctctttgacctagggacatatttcgcttcatacgtcccagtgcgagcacgaaccaacccgctcttgaaattcgccgcctgtgcatattccgccaaacagctaggccgagtcaaaggtgccaaggcatcggtgggcggagtctgcacccagcagtctgccatggaactgtggcctgacaaagaccccgacttcgcatggtatggggccaaatattatgaaaaggccatccagctgctaatgaaagagctgcaacctgacgcagagggtccacctcctttgagcacccctgaagctttcggtcaatggcaggctgccgagatttctgtagattcggataacccacgtaagcgccgcagacgggtttctgatagtcggctctcgcatggggttcattccgacgaggtgctcgcggcgacgaccattctgtctgtttatgagttccttgatgccgcaggccccgcgtggaatcgtcatttgagtggcgtgaagtcgttgcttgatgtcgctgaagtgggcatgatgcctcttgagcagcgtccgtctccgggagagagctcatatcagacgcagacgcctaagaagtcgggtctttccaaggctcggaaggcaacgttttggaattttgcgcggcaggactacttagctgcctgtgagtgttgtctgtcgcttcccctcccctccaaacttcgctgacagaaaaaaagtcatcaacgaatgccatacacggctcaacacagacgatacagtcctctggaccgaagcagggttacttctcgacaacgcgggctttgtacgcgctagcaacacaagcgcagcaggatatccggaaggtgaagatgtaatgaaagaagacctaatcagcaacggactagtgtggatattgtccaagatagtcaatttcataagctctggcgacaacctgcacataagcggatccgtgccaggacccttgggcgtctcgcaacaagccctcctggagcggtggtacaggcttgaatccgagctcgacgcatggtacaccgggatcccagagacattccggccctgcgcccgaatcgacgcatccaatctcacacaccaccggccgcccgacgaacacgaagacatctccaccctccaggaaatctggtacagccttcccatgtgcgcctccgccatgcagcattaccacatggcgcgcatcctgcttctcatcaacaagccgcacgagtccactagccggcgcagcaccataacgctccgtctccagtcataccgctccatcgagtctgagatcgcattccacagccgtgagatcgtgggtatcggtctttctcgcccggatggaagcgtcaggatcaactcgctgcagccgctatttgttagcgggcagtgcctgacggacccgcgtgagcgccgcactaccgtgcgtctgctgaggagtattgagtcggatttaggctgggcgactgagtaccgtgtgcagcaattgctgaaggagtgggggtgggatgagaattcgacccgctcgcctggtgcttcttgttcttgagacttgaagacaagacaaggtctccagcctaggaactagacatagtgtccgggttgaggtttggcgcgggctcaaccacgttcattgtatagtacccagtccctcttggtcggtcctgtattggagccgatgaaatcatccgagggtactggagtgaagtggtatttgcagatatctcggcttatgtcgaattgtggccatgcattccaatcttgtcaccaccacatgccatgctgagaatgacttgtcaaacgacaagcgactgggaattcccgtcactcattaggggatgtgccctctcacgtggtgtgacgaatgccagagacacgagtaatgattgtttatgatacccgtgtacctctgatagtaatcatagtatagtacaggtgactctcacactgcaacataggcagtatagccatagagtggacagatggattctaaagaaaaagaaaaccagaaatctcgttagatttagggtcgagagcctttccttgtttgattctgcaagttcggtttagttgcctttggaagacactaaacgtggtatacatattatcataacccaggcgtgttcatttgagattatatactctatattacttacatgattgttctctagctctaactaatctaattacgaaaaaaaaataaacacccattaacttactatttaactaacaccccaatctccaacaccaaccataaacccatccagccctaatccaaaccccaacctcaacgctgcaggttttccgttgaccatggtgtcaccgaatccacttccccccaccgatttacccttcttaggttccgggggggcaacttatccgaaccaggacaccccagatccgacattattcaggatctactccgtacgtgcaggaatatatcgggttactagtatcggctattccgtgcataattcatgatgggtaggattctggggattgggtcggaatacaacatacaacatacaacttagagactagagaatggaaagttgagcgttgcagaatggggtagaaagaggtatttatagcggatttatgttggtcgctgtgggcgagttggagatttagttgagacattttgtaagcttgaatattacgagcttacttggacttgggtttgcggtgagcccagacttcatctattatttagaatttcgagcgctgcggtagcaatgtaagcgcaaattcaacagagataaatttgagcttgtatgtttgatttttgtcaagtggttgggtggtttacttctacttatttaggttgggaagaatacgaagtgggggatcaggagatatttcttcttgctttggttaatggtagcaatcacctagcctctttgtatttcggcaaaatgaggataatctctagcgtgaagactattctgacctgtgggttctttttctgtcttttcttcggtttcaccacgagccagtgggtcgatgcggacgggaaaagcagcgagtcagattgagcttcgagctaggactcaactacgccaaaggccgaaatcacgtatacaaaagaaccctggtaaaaccaaggtggcaagaactacaggtggagttctgtgatttgatgtgggctatgcttgagcgaggtgttgtatatcactcataagtggatgatcgtgagaaagcgcgaaagaccaagatgcaaaggtgttttctgactggcttaacggtcgggggtccgtgaatagcgctaagtgtgatgatgacaagaggacgccggtgtgatttgagctagaaccagctactttgtccgtgcatatcatgaacgtatttccgcaggatgtagatcatagactatatatgtctagtgaaagtgaataagcctgctaatctatccttaaataagatctacaggagggtcgggatatgaacgggttagcgtgggattcgagagttttacaaagtactccgatgcatttcaatcacctcgttaagcacttcattgtgatagatcggctggctgcatacagagtacagaaatatcatgcggtggtctcttagcatccgattggactcatgtacgacgaatgccggtagtgatcacagcgggagatgcgttagtcgtaatgattgggtggattaacgcgtgggctctcggggaggaatgctattgttggtgagactgaccactctggcccctctgacccctcggtgctacatacaatagacagactttgatgtccaggggtaaaaaggcaatcgaatcaggatgaagaggggagtggttggacatgggttcttgagctcagctccgcaatttgcatagttgtgtatttcattcaacattagcattgtcttattgttttattatattagttattatatatgggatattatagctcactaagactaaataataagacgatatcccgactgttcttgtattgtcactgtattttatccccgctaaaccaccgtgccaagaccgaattgagtttgcgaggaccgtgggtcgacttggtcctaccgggtaaatgtgattgcaagggtttatgtattgtattattatagttagttactagctaaacactattagcacactgcatatggtcacatcccggctagactttgagagaacccttctagactattgctggatgcgtcgggtggaaactcctcgcgtgcgctgctgccaagggtccgggattacatgtgggattcttttattccaactttggaaggttgtagctatatagcggatttcctctgccacttcttgacgtcccctttccgttttagtgctcagaccttgccgctttttgctcagagtacaactgagcacgcccctgagcggtctgatccgctcactgagcattacataagcacccagatctgctcacgtgcagccctccatttttagatggcacccatcgtcccatcaatgtgatcttcaatcctggtaaaatgactgcaattatttgcataatggagcttgccatttggacacccaataagcactaccatgaatccatacgggatcacctcaagcagaatcatagtactattattgattgcattctcccctcttcaggagtccgggtcgctgaagctgggtcatttaagtctttttcaggtagagccggtggactttcgatgatcattgagaactgacgtatattcaaggtgacgtgatcatgtcttgcaagtgcaagtggaaatgtatgtatagtatacgtacatatcaaaacccaccctctgcgtccagtcaccacatcgaggccgttttcctctgccgttgaagtttgagtttgagtgaagaattttcctccgcaattttcttaagtacagcaatggttatatctggtatatctgtcataatcaccatactttcatcgtaggcgaggaactcctgcgcatcgcatgagattgacttaattatggcgtctcgaatctcgctctcaagaggcggaatggtgatccagatttgttgcacaatcaatggaaatccccttgcgttttcggagatccaattcataattcgagatctcgcaaggattttcagtcgcgaaatgtcaaacttgtcggccgccatgaacactccgaggttgttccacatagctgcatgaggttccataccattaccagaagcgcacttccgattttgaaagtacgagccatctgtgtcttcgtagtcttggtggtatagaaaagagacaacccgttgaatagttgcaagctcatcatctggcagatcaacatgtgatagcgaggcttccttgtaaaaaagttagccatatgcagcgatcacggcaaaggcttgtcgcattactctgaatcctcctttgactgcagcgtcaaaaaagggtgattgtgaacagactatcgcacgatgtacctggaacttctgtccttcgcatgatatcgccaggtctgagtatctacctgaatccagaaggctttgcaagattggttggagatctggaaaccccatgattgatgtagctacatgtaggccaagttcaactcgattctagcatatatcaattctactctatcattgaagactatgacgtcaacactaagatcgtttgctgaggagtgggtcatcctgaaattagcttgaacacacttgatcatctctagacccaccgctaagatctatcattgagggtcggtctcagaaagtcagaaggacgcaccatgtatagctctgtatcttactacatcgtgttaggtccccgccgttaagctctatttgttgaatgtaccgtacgagcggcacattacgatatctctcaagttaatgcgtgtttacggcggcttttaactggaccaaggggtgcacagacaccggcggtctgatagagcaattttgttcagttataaaggtgcaactgattgggttgtgcgtcttactttctacatctgccttttcagaaagtaatttgcctttctccctcgaatcactacgatgtgagtgattatttgctgttggcatatctcaacaattgacactgcatagtgcgttccagaatgccgactctgccaatcgttaacatggaactgcagtttctggagatgagagagacctacgaagactcaggttgtgggttccagttcgcagggactctcgttgtgtatcaggtgcagggccttttgtaccatgcaaagctgaaaggccgttgctcttctccttcgattgtcaatgcagaggaccttatgaacgttaagcaaattcctgcgtcggcctacgatcccaaatttcctgtcggatttacgctatcgcctggatccctacctaacggttgtcatgtcaaaaaaccccgattgatcaattgcgatcggattagtgaaggacctcaaccgaatttgattgcagaagatatcctcagggaagcaaggatttacgaactcttaacgttacacccacatcctaacattgctacctacctcggttgccaagtttctgacggcacaatcacgggactttgccttaagaaataccctcataccttgatgaaagaagtcaacccgggcgctctcaaaaagagagcacttagaaacatgcggaaagcgaagggggaatacagtcatttcctcacgggcattgaaaatggcatccagcaccttcactcgttggggttggttcataacgatatcaatccaagcaacataatgatcgatgaggatagagcaatcatcatcgattttggatcttgccggaagctaggagagagcttagaaaatgtgggccgtacctacgaatggtgcgatgacaaagttagaagtctcttctagagaatgacttgaacgccttggaagaaattcgcatttggcttggcgttagttcacaagaattccaatttgatgaatagttcaattcatttgaaaatctgagccattcttcggatccaatggggaggtctcgatcaatatgcctggctgttgagaaggctgctaaagatactatctttccggccagcaagtttcccgggcccatccatctctatcacctttccctgatctagaacgaggactaaatcatgatccatgagcgtatggacacggtgtgccacagtaagagccgtgcatgaatgaaacggctcgcgtcgcagaagagcctgaacatgagcgtccgtttccatgtcgacaccgctagttgcttcatcgatcagcaggatcttggcgttgctcgcctgtatcttcagtattgcacgggcaagctccagcaattgttgttggcctctcgatagagataaagtattagttatctcagcttccagtccacccctgtcatccaacacgcccttccaaatccctactcggtctagggccgcgatgatatctgcatcggggaactttcctgtggggtctgtgttcaacctgactgtacagcccaccataatgaatggatcctgaggaatggtgacgatcctttctctgaccctttcaggttggagggtggcaagatcgacgttgtcgatcagaattgatccattcgtgatagtgagtatgcccaaaattgcggataatagggagctctttccactaatttctcatgacggaagggtcaggccagatcctcaatatttcaccgggtagattacgcagagctgaaacttacctcccagtgcgcccacaaatgccgatcttctgaccaggagaggccacgagagagacactcttcaaagcaatagctttcggactgttcaatctcagtttagtgacctgggtgaaatatactcatttgtctgtgaagttcttactggtactgtgcactaacttccgagacgtgaattgcgccccgatctggccaatcgctaggtggttccgtttttccgcttgtgacttcgctgggaacctccatttcaaaatctttgactcgtgagattgaaccaagtgatatctcaagttgtgtccagcccgatattaaagatgagagacttccgttgaatgctaacgatgtttagtcagacaggcaaagacgataggttgaagcatttgatagaagaatgaagagaatggagaacagtttcatggtcagacatgacttacagaggatgctgtttagtgaaactccgagtaatcccacactagtcttctgcctcaaaaataccgctaggctaacgacaataatcgcttctgcggcaacaatcagatccaggaccagattcagccaacgttggatgcaatttagcatatagtatgtgcgttgggtgacatctaatagtcttgagttcttgttctggaagtcttcttcccacccaaatgcttgaattgtagcaaggccctcgactgtatcaaggaaatgagagtacagtgggcttctgctttcgaggtccagaagtcggagctgtcgtgatgtttttagataaacatgctgtagcaaaaagacagcaaatatcaagaaagggagggagatagccatgtattccgatcccgtagcaatgagtgcagcgctagcaattgatgagaaaagatctttaatcataagcatgcatatctctaaagttaaaggtgcccatgataatcgatagatctcatagcgagatcaaggtagggatgggacaagtcgtgaaagatttagggaagcgagacttacttgaaactgtgatcaacacgccgataggcaattgactttctacgagggtcatgtcttggctgaatcggttcaatattgacccattgtcaactgttgaaaggaactgcggtgtcgcccttcagagatcatcagcagacgaagacccgaaaagatagaatcatcatacctaataacggtcctcagcacgacatagtgaaggcggcgtgccgttgcgggcgaaattaggatcaagatagcccttttaagtcgtaagcaattggttgtttatgactgggctctatggagacctcttaacataccaaacgtagccaccattcccgatagtgttgcaaatcgcgaggaggaagtatattgtgacatataacggcttttgacctccgccgcggttagcccaccgctcaagccagatctctatgtgcaaagcaatgtcagtggacatgcaaggagtagtggaatatgaagtttcacgtactgccgtatgtactggcgaagacattgatagtcacgaaggaaacaaaaatcatggccttcgtccagccgatgtagcgcaaatagtacctataaacagccgagtctcccgttgctcttctgagatcattaatatcattcgctttagagatctcggctgctttctctttcatcatcgactttgtactttcctccaagccctcatctgctgcagcatcgggtagcagagcttggtagacggttctctcgcgggcctcttcccggcgaagattcccgtccgaaagagccagaacttgatccgcataagatagataatcaactgtcgagtggtcagtgcacaacactagggatttgcggcatcggggctgttaaagggagccctactctcatgagtcaccatcacaacggtcgacattgttcttcgcagaagtccgtcacctccgaagagacgctccattatgatggcctttgttttccggtctagtgcactgagtacatcatctaacaacaaaagtttcctacgggcatacacagcccgtgcaagggcaattcgatgcatttgaccgccgctgaacttattcccggatccattgccgatttgcgtggcatcaccctcaggaaacaattccaggtctggaagcagagcacatgcatgaagaacgtccgcataccattcacagtcaataccgtgagtggttactgatcctgtagcagttaccccgcaaattgcttctcggatggtgcccctcgggatccaggggatttgcgcgcaaagggtcgggtttttgatttttactgtagttacccctttctcgcaaactgcttggctaagtatagcccgaagcagagttgttttcccggatcccactggtccccgaatgattactagatttccagctggaacttggatgctgatatcccgcagtactatctttgccgatggaactgggcggatattgactcgttccataaatatgacggggaatgtaggatcagcagtgccgctgctcaagaatgatatgggttgcagctcaccagagctatcgctcatgtgaatgtgagtttcttccgtggtaatagaagttgtatctgggtgatgctgaccagtcggcaccatgagaaatgattggattctatcaaagcatcccgtagcggccgccgtggaaggaaccgcactaagcagcttagaggccgggctagtgagaagtgttataattgacagactgctgagggtcttgctaacatcaagttcctttccttgagcagcgtagactgtgaaggtcaaagctggtgccaatgcccatggtagattctggattatgttttgccaaacgatgctccatcgatatttggccatttgatgagtttcttggactcgtttgttctgtatgatatgaagaaaggtcttactcaaccccatccgcttaacagtttggatatcagccagcattgaacgggtgattgcgatgcgctgctgaacagcatcaacccaatttttctgctgcccaccaatattcttcgagatatatgtgctccctaggctagatactatgcaaaattatcagcaaccggtagcgtgatgtgaagtgattgggatacccacggatcacgataatcaatggcatcagacaaacccatcccatacgaagagcaagcagcgaaatgccaatcgcgacctcaatagtacgagcccagcattcattcaaagtcactaggcaatcgataatccggtcaatgtcggtggtcatgagagtaattgtggccgaacgatcctctagtgccccatcggggatgcgcaacgcatggtcatagatcatcgacgaagcggcccctcggaaaattgtcgtgaaccgatttagcatgtggttatacgacagtgtagaaagagccatgcccaggtatatgagaatagtggcgccgataagaccgtagccgtcgttcaacgcggtagatggatcatcaagccagttaagcatggaagtgatcaggaagggttgcgcaaaagtaaatcctatcaaacacagtcgaggaaataccactagtgccagtgaggccctgagagcccgacacatctgcactgggaattcgaagcggcgtgccgggtgctggcgttggatccaagcttgccgcgccttctcggccgcgcccgcagattccagaggcttatccagaacatccagatcccccacagtgagcaaagatcgaaaaccagcatggaaaagacggttcaaccaccacagaaaggaccggttcaagataccactcgttgactctggtggcagatcacgatacgtaccagtgaggtacttctgcttccccagactctccagaagaagcatcgtcatctttgcagcaacactggccgtaaatagactgggaatgagacttccagtgcgggataaccagagagttctggtctgcacaatgtcgaagagtagcgtgaggacaagatagatggcgaggagtgatgacggcctgactgatcgctcatcctccatccacgatatgactaaaatctccaatgccactgcaagattgatcgcgccagatgccacggagatatatgtaaaaggcttagcattctgtgcccagctaatgagcagggcgagttggattgcggcaaacacgacgatagttatctgtgctatgatatgagttggacctccaaggtaaaggtgtggaagttctcaccagttttgcagatctcaatttgttaaactggattcggacatcgcatttcgcgagaatatgtagtcgaacaggagaaatgatgagaaacgcgaccgcagggacgaggccgaatatcgcttgctcgaacagaagggtgaaatcaaagccatcgcgacacccaggattcgtcacggggccgaaactattgtccgcctcaagcgggcaccctaaaggtatcatgctgtgtctatctctctaaatcgcatgaaaaaggagagggaaagatgagaagttgacttttgaatgagctagtaagctcctgccgcgtgatcgagggccttatcagatatgtttctccgtactctgtacatacggcgaaaatgatttaattggctgggtactttggtttaatttgttttgttttcgcagatctccaaggctattcaaaatattggtttcgaaaactacgtaaactaaaagatggccgacgtaaccaactatagaatctcatgccttgaaagttgacaccttcgtttgaaatcagtgtcagcttggcatgcctgtaatttatctctttttgcatcaaaggacgggctacggcttcttcggcgatacccgtttatgctgcagatcgacgctacttacaagacgtgttctactaaacagataaattaaaggcatgccaaatttacaatttttcttcctccgccggaagggtctcattgccgcggtagaaatgccagtccattctctgcaggaacttggtgactaggtcagcgaggtagcattcagggcgctgccaggcccacggcatggaatcgaaaatgcctctctgatggatctgctacagctaccgaactcatccccagtcgctggactcgaaggaggacgtgaacttcccgtttccaacttctctcgcatggctgcaatttcgtcacttgccctgcgagtgatacctccgacggacgagagcgtagcaaagttgatgcttccaagtatgaatgagagaatattaaatagaaataggacgccagtgcggacgaggaagcggttttggagccgggtccccatcgatccgtccttcgtctcgttccgggcatttatcgtccacgccatttaaaaggggtcatattgatccaggctgtcattcccaatgctcgagaatgctgctcctgaaaaatgacaggctttggcagtccctcgttgttcaaaatttccgatgtagtttggtaccgagcatttttgtgtagtcggatgagaagaaaaccttaaagactggagcacaagaaaagtacgaggggcgagctcagctcccgaggggaagacaacacagatgtctcaactatccacgcatagtctgtgacccaagatgggaccgggtatccgtatacagaaatcggatgggtcgcgatgaaatcaacgaggctattggccagcctcctatcgaaataagaagcttgttcttattaccgcttccccactattgcttatgttccagcactgctcgcttaaattcgagagcctagagccctacaccggagtccccacgggcgtccgttgatagcccggccccacacatacgatccctgcctgatactacctaggttaatggattatatatatttttcgtaggtatcttaccctactaagcccttgtatcaaaggtcttattgctataaaacccaactttataaagattataaaggataaaatacttatagagttaagtttagtgttaacttattagggatcgtgtaacttcccggggaaccgtgtggggccgggctatcaaccgacgcccgtggggactccggtgtagggctctaggctcaagcgtgcagtgctggaacataagcaatagtgggaaagcggtaataagaagaagcttcttatttcgataggaggctggccaatagcttcgttgattctggcacacctttccaagggttccaagtcactccactgaaagctttcaatcggttgaaaaaagtaactaatgttgtgatgagtggctttattgtatttgatcgtcaacatatatgcaaaacacttctcattattcattgtatagagggaaaattgagaggtttcagtacgctatctgttttacctcgcccgctatcaagtacaggagtgggtccaaacaaactcaaaattatgggacttacatgaaatcgatgggccagcgagggcgggactaggcagctggaactatcggaaagtttccatgggggatctcttgttgcctaacatgcttagctacttctgtaatgagtgagcatgatgtgtacgtgtcccttttgaagtagaactcgggcgtactgttctatggagtacatccttgcgctccctgtcaggctaaaccaccaatttatctttacgcgattcccgcagttacggcattatttcatcataatacggagtacaatatttctattttctataatccattatccggacttcccaccagaaagtaatatcggacatgagattgagtccttccggccccgtcgtgaagtactaccccaatgcgggatcagttgacaacggctattcagctccttttgtgagaaataatcctcgtagactgagaaaggcattctttctgattcgagctatacatcttagatctttattaaagcgtggcacatggattgattatgtacctagtatgtagctaggaatataaggataccaagataattatattgtcactttgttctcaaatgatgttgtctatatacgataatagatacaaatagtgggcgaacaaaatatacaaacaaatgaataccctccctatctcccgtagcttgacaagacttcacgccacgccaccatttccttaactgtagactaatggtttctgaatgttcctaggccttgtcgacatatcaagcggcaatgtcatgatcctgggctttatgataaccatgaacctccatgaactccctgactgcggtctaaacagtatctcagcattccataaattggagtatggccatgtgcatctgcagcagacttaccttgcttgtgcaaacatgagggatgcccttcccgtctacttggtatcgtcttccatcttcctctgttcttggccactccacggtcatgtcggcaggacattcgaatgcttgcctcagatagtcaaaacagtggccggtgtgctcattttgaatttgtttattcgcttgatccctcatcgtcgcaggatcatccacctttttgttttcacggtttataccacaatatttttccttctatgggataactcacctccaacatgtccatcgacaaagggccatgagtttctccttgacacttacagtcagtatggtcccatgggtttgaaaaaatcttgctaaagagaaaatctaggtcctgcgcgggaggcactgaagtgggaaccgaggacgtttgaaaaccagcttgagatatcaaatccatttaaaggaccacccagaccagaattagaggaggcatggcacaaacttctaaatccggccgctgctattcgtgtggataaagaagtactcgaccgaattaaccggacttctgttgctctccaagacggatcgggctatatggttggtctggatgtctatcatcaactgcattgcctggtccgtattcacaccagtgccattaggtatatcggcttctgaatcctgtactgagaagtgaacgcacagagatatatccgcagatacctccaccgggagcactacaatatgacagaggaaaacctgggtcagcatatcggtaagccttgtcactatatccatcttaatgtgagctaataccctcgaagaccattgtttggatggcttacgacagtatatcatgtgtaacgtggatgtggttctcaacacctttgactggattcccaactttcctagaccgtggccaaacttccaggttgtgcatgagtgcgtgaactgggaggccatcgaagactggaccttggcgcacagctttaatggatttgatcctgatttaatcaaacatacagatttccatcctgagctacgtaagaaatacacctaagactggagaagtggaagagacactgactgatattgatttcacttcagcgagcccattcaattacactctgagcgggaacgagccctaagatggccgggtattttgtgaaaggtataactagtccgagttagaaattgcccaaatgtatttttcccagataaattaaatgtttgagacatatctatcagccgcaagttgtattcgctcagtcgaccaggccaacacaaatccgagtcccggtaagatggtattgacagcactttgaaattcttgacagatggtaaaagcttctcattttgactgtattatttcccaatcctctaattgaaggccagtgtaaataatcttcctaagccttgcaagttcctgggggatcattgactggcgtctttaatgagagggtggggcgaagccgatatgagtccaaaagaaacagtcgaacttccttgttggcggcaatcacgtactttgtgcccaaactggccgcacgaattacatctaagaatggtccgccgccagttctgacatgtcgtaatattgttcgtctgtgactggtctatagtcgatagtcgtggtgtccgtatcttctagtatcggtgattccgggactcgttgtccgctggatgaccgtacgaataaacgtcgtataatacgtcgggttgtaataaggatctatattttccgtttgttgtgacaacagattcgctatgtctgggacgtcgtatgcgtttcctggctttcctagtctctttgctaggtctcgtcgattatgtcgttcttctacaaaaggctcctttcctgcgctttatcgtcgcttactcatcaggcgtgttctgttagttactcaagtgggtgatcaaaagtggctaggcgctctctgcaacctgttgtcggatatgaaaaatcgtgatctgttcaagttgttttcggacaaatcccgtcgcgtgcgcacatacaaacaactaatgtgtcgtaatgcattagcggaattccccaaaatccttctgcagactaagaaaatgtctcagaagaagagtcaatagcctagaaacagcctagatacatgtagaatccctctcggtttcaaccgcctcttagactccgccaagtggcaatcttcctgcatccgcaagtctggcgagtcatatacacatcaccagttgggagattaagacagatttggttaggaagccccgttggaagccgacggggagtagctagttcttgatgttgcattggcaattgcatatgatggtcgatacataatatttgtcagaaagccgatttagcagatcattaatagtcgtactagtaaacatggtaaattagatgaaattacctcggaccatgaatcctatcccctcccagtcagatacctatataaacatcataccaatcctcgaaattcgagattagagttggaaatcgtctaatacgacttcaagaaaatataccatctgatttgcttctgaagatcaaccttgaattagaatttcaacatgcgcttcacctgctttgtgttggctttgccattcctgtcaattgccgcacccatgagtggtattacctccatcctatgaattgatattttctatttcctaacgtctatgatagctggctttgaaactcgaggcttggaaggaactgaggagaatggacaccaatcctacaagagagatgttgctggcgccgaggagaacggacaccaatcctacaagagagaggtctctgcggcctaagagcacccacgcgtacgtgctggcctcatcagcgaaatatgcgtcttctttactagacggccataagtataagcgggctttatgtacttcacatatgcacacattttagctcatcctttcctcgctctgtacgagtagcacagtcaggatcatctgcgtagtagctctagatatatgttatgaagcctttatgtttaggttagaactctttgtcgatgatcttgtgccgattagctttatctagcacctttagacgcctggccagaaagatgtaaatactgcagtaggggtttctagagtaagataactgagcggtcatatgatctatagttagttagctaactagtgaagagggaaatgcacgatgggtaagtatccgggccatataggtaagataagaacaatataataatactaactaactatctaggacggttagctagtaagtatagggattatatagactatactatagtatataatctcctagtatataaatatcttataacttacttcttatttctagggtaataatctagttaggctctctctttctaaaactctacttaataactagttaggcactcacttttctctgcctaaaggataaggctactaaactagggattctgactttctctactatattagttaacaaatatacttagttaccccttaactccctttatattaccttatatagttactctaacttatatctcgtctacctaagaagcgtccctttcttatcatacctctctagctatacctttatccttacatcctatggcaggaagatgggtctccctgccttattaattgggcatctgccggctagttactatccaaggttgtttgagttctgcgtgcagtggattactgaaggaaaggacggtaaatttaattctcttctcttggggtcgatgaatcctttgtccagtccagagatggcgcaaaaagagtccattatgcgtgcttggagaaatatccagaagtatcctttgtgagcacatgagactccagttatttattgattgaaactcacctacttccatccagtcagaccaaaaaatccaaaaagtccaaatcatgccaaagagcatcaggagaacttctccctgttccccctccttcgatgccagaatacccaccagattggcatgaacaagataggcttctatcataggtattttgacgtttcctttttgaatatgccctataaaaaccgaataaatttccatgttaacctttctttctcattctcactaatcccaccctgctaatctacatctggaaagtatatgacatgagcgaggagtagtcttaaccttggtgccctctttgagcccccaaagagaggccaatatcaaaccgccgcatatttctcgtatcaaaatcgatgatagagcaagccacaaacacattcttcagatgtcaacaaaacaagcagtctacacccatgacaatatctaaacagaaaatgtcaaacacaatgtccatctacaggccaccagcagagcaaatcttcttagactcagggacacgctcctggtaccgactcgggtacgcggagccctgtaccttctggcaaagtttgccagtattcattttcttccagccactgactttcttcatgatcttgaagaactgcgcggccgactttgcagcatccatatcagcagcgatgttggggtagtaaacagcccgctgctggaagatgcccacgctgtcgtagtcctcagccacagcatcatggtgatacttgagagaagcggggaccttcttgttggcgtaaataagaatgttagacttgaggtagtgttagcaagcttctgtgttgttatatttcaattgaatgtgtatgttaagactcacctcaacaagagcggttgaaattccagcgagacagccctgacgacccaggccctctttcttggcctctgcgatgatggcctttgcgtgcttggtctgggtggccgagagaccgggcagattgctgctggtgctgcgctcgctgagggcgccttcgctcagggtgtcttcgtcatcgacagtgtcttcgctggggcattcctcggtgacatcgctggagaagtcggaaacatagcagtcgtcgacggtttggtgccagatgtcgctgccatcgacggtagtgccggtggcctggcagacgatttcaatgtcagctctctcctcgtaggtcttgactacagagtgagaggctcctggaccagagtggcagtcgatgacgctgccagtgaccgggtaggcattgacaattggcgtgagagcgacaaatgcgagtgcaagaatgggagtgaacaccattttgaatgagctttggggttatacttgagtatattgagaagttgaagctggtattgaagaatgaagactagccgatgttgcgatcttgtgagctgatggatagaggagcttgaaggggaggcaatgagcatttcatatctctgggatcctcaatttctcgagatcgtatactacatcaatcaattactttgtacattgttgcatgcttcggacccttgtttgccagattgatcccgtgctcttgccccacgaagctcgtatagaagtggaatctagagagatcttcattgtttttttcccacaaagcccgtatccctagtcgaggttgcatcaagcgagattaatgaatctatattcaggaaggccatcccgtataaaccctatagggagttcccgtgttattcaaacgtccgatgttcgaaagcttaatcacctgtcagggcacaacgtgcacgcctaaaaatagcagggcttatacgggtactagggtcgattggtgtagatcaccgtattcaaactatgcacttcaactgattcgccagtcatgttcggggcagatttagtgcgtgctacatcggagagatgcgctgaagtatctcgtttcatctatagtatagaagtaatttccgaacgcgggaagggttcgacaaatatgggtttacccttgttttgcgacaagcctttgtagtgcatattaagcatcggctattgtaacccttatttatgtggtaattgcaactcatgtaccgggtactacgtcggtcatggggaccggactgaaggaataacgagattgggctgggtgcatgctaccaaggtctcgtaatgtatttcacaagcgagtaggccttcgagacatagcaaatacgatgaattgcaacacgatcttacaacaatggttatttagaatatactcttatggaatctaatcactatcgtgggtttcgggaaattcaacaaaatagtgggatgtatatatttctaaagtccagtgatatttgcgatactatgacaatgcagttctctgaattatttgaaattgagatatgttagttaccagaaatgtttatcaataactaaataccaacagcattggctgttgacatgtctcgtggtccagctcgctttgagatacgttatgatcttgttacttcttagctcagatcggtctaaatatagtattggaggaatccaacctctgaagagtattccaaacaaagactaaacgtcagaaagtgcatgtttgcctagcttctgcaacgtgcttcaatttataaggtgtgacaagttggcttgaccttgtcgaggatcacgagtctcaatggatactgttttggataaatgagcgagtcaagtcattgtccactatccaccctggttagtacggcgtagctgaatcaaccctaaggctgtgagagttatggctcttctacccgattctattgtcaatatttccagaagagctccgatcaagcttgatatatatatcaattctgcccaagcccctttgcattgacatttattcaccaaaatgtgtgacctatcaaaatataactaattatacatgaactattgaagaatcctggcgttagtgctaaaactggatctcctcaagcgggtcagtcacaccgactggactcgaggctgagacaaagcgagaagttcaaatgagcaaaaaataagtataataagtcgagaagtatatacaatcgaagtgaagaggctctatagatgtatagataaggaattgcatcatcccgaatccccgacgtcactacggcagaaggcggagagagagaagaggcgaagctgaggcgtgtgtgtccacggctgtgaacctgtgcacttggtctccccgctctctccccagccaccgtcttatctgtcgctttccaccttttttttgcttctgccttctccttcatctcgagtaattttatcaccctcttcatctgtggaaaaaacaagatatggctcctcctccttccgccaccttgcctctggttgagagactcaaggccttggcgcagaccctacagtacgtttctccagtccaaggctgaaatgaagcttcaatgccttgtttatccatactaacgagatgtcacgttgcaggtttgcctggttcgttgggtaggtcaatctgaagcgcacaccgacaaagatccaagttcaggcccactaacaatttttagacatgtgacacttttgctctcagtcttccgctactccctgtcttgcatcttcttcaactactactcctccgcggcacagatcgcctaccgtttgaccttcatctcggccgctgtgacttatggaatcgtcgtgtacaagggccacttcgcccgaggtgtccaaggcagccctctggcaattgtgttgaagctcatctctgatgagaatgtgcaataccttggtaagtgatcagctatgcgacagcccaaacctcaagcttacacgtattctagggatggctctggtctggctgtactcgcgccagctcatcctggctcttctgcctttcagcgtctactcggtcttccacgtcgcaacctacagccgcatgtacttaatccctaccctgcagcccgctgctccggccgcccctgcctctcccacctctcctacctccaagcccgctgtcaagcagtctcccctcgccgagaccattggacggttcatcaagcagtactacgatgctagcatgggtgttgtcgcaaccctcgagatcgccctgctgttccgacttgctctgtccgctatcactttctccaagggtagctgggtcctcttggtaatctacctgtctttcttccgcgcccgctatgcgcagagctccttcgtccagcaagctgtccgccagcttactgcccgtgccgatgccactatctcccaccagagcactcctccccaggttcgccagggctgggaggccatcaagggtattgtgcgtcagggttacgagatcaccgatattggccgctacatctctggccctaccgctgctaagaagccgcagtaaatctcgatatggtatgccagacaccttgctttgcatgctggagctcatgacatcaggaaataacatgggtttttggtttgcaatgttgctgagtcaaggtggctggtgcaaataatattacagctgtatctttcccataggcatgttcccgcctgagcaaaggacaagaaggatgtcggagtgtgggacgcccaggtcccgactgtagaaaagaaggacgcggaggattcctgccatgatgatgctatacgcaatgacttgtgtttattatttctagagtattgcgatgcatagtctgtatttgctctcctcttgtcaacataccttgtttcggattcatttcattattccaatcacggagagtcgtaaagatccgaaatctagtacaaagggtgggagggcttctaggcaggagggctgcaacggaacaagcgctcaacgtccttcaggacagtttataatcgatcaatctggtctagacaaagaagatatcagagatagacagttttcccgagatatatttgcccgaatcaaagtaggttagtgcttagttatactagactcgaggggctcttactcaaccccgctgatcatcaggtttctttcataaaatggcctagcggtaactgaaactaaagaagccccaagccctgtgaaattagctggttttactagcattggacaagctctatgcataagtttattaacaatgagcatgcaattacggagatatatagttgtgtggaggatatcaaggacaatcaagaagctcatttgcggcttgtagcagttgactattttagtcctcacacatatagaaaaaaacctctccgatcaaatatacatagttgttcatgccatatgctgtttttagatcgtatctctctcgaaatatcgaatgactccaatgacagaatcccgtgattcgtgcctgaggcgaccgacttatcgggcttggcggcgaaaagaagccgatcagaattttggctggcggaacaatcatcttgcaaacaatactaatcaatcctttcccggtctcttgtcactctttcctattatccttacctcccaggggtgctcctctcccgctcaatacctcagcccctcagcacccccatatcccagtctggtcccgaccagtaccatcgggatcccaatttagcataatattgccatgagcctgacctcgcgagtgttcggcctgttctcgacagcgacttcggactcaacagcaccgcctgcgggggactcgaatacctcgacatggacacagcagacgccagtgggtggaaccgatgattcaaccttcactgctcgaaatggcgacctcgcgctgttggaggacgaggaacctcggccgccatacttacatgtacaattgcccctagcggcatcatatcattgcccaaggactgacctgatttgaaattataggcgatgttggccggtggtaccggaggaacatgtggcgacatgttgatgcactcattagacacagtcaagactcgacaacaaggcgatccgacctttccgcctaaatacacttccatgggccagtcctattcaacaatttaccgccaagaaggattctgtcgcggattatatggaggggtaacgccggccctgcttggctcgttccccggcaccgtgatcttcttcggcgtgtatgaatataccaagcgcttgatgatcgactcggggatcaactccaacatcgcatatctatcaggtggcttctttgccgacttggctgcgtcggttgtctatgtgccatccgaggtgctgaaaacccgactccagttgcagggccgatacaataacccgcacttcaactcgggctataattaccgcaatatgcaagatgggttccgtcagatcgtccgccaggaaggattttcggcattattccacggctacaaggccactatattccgcgacctcccattttcggcgcttcaattcgcattctacgagaaagagcaatctatggctaaacaatgggttggacaacgggacattgggctgggcttggaaatattgacagccgccaccgccggcggtatggctggtgtgatcacttgtccgatggatgtggtcaagacacgcatccaaacccagcaaaaccccttagagccccccgccggttcttcgggcgccaaacacactgttgaaaacgtaccgaaagaaagcccacggccgcacacgtcgacaccatcacattcccacccttcgcgggcacactcgcgaccaatctccacatcaggggcaaacacaacaatcccaccgccgggtacaccccgacttgacacttcctccgtgttcacagggttgaagatgatctatcgaacggaaggtattgccggatggttccgcggcgtgggcccacgcggtgtatggactagcatccaaagcgggactatgctggttatgtatcagtacctgctcaaacagctcgaggctcaccagattctagaagagtcttaggaccttacatctaactgcatgcatttccaaggttgctgttctttttacattttttttgtcattgggaactggaggcgttggattctttgtcccgatctgggatgttatgaccctgctttcagcactttgtatattgtgtaccctactctgtgatagattattagactggctgcggcctcctgtaccatatctctttttccaactccatattacatatattgacatatctatactccgggttctatatctgtttagactagtatctaaggaagaagggcaagccatgtaataactagatatcaacaggaaatgcttggacccttctatcatacaaccttggttatatattctcaaaatacatataaaaaagaaagcaaaaagcccagcggaatgacactgaacaaagggagtgaacgcgctagaccgtgttttgttttggcgatcggcggatgtaaacaattaccggccactccccctccttgcatcttctctccccccagcatttactttcttatttgatattggtccaatttctacagtgatatcggatacattatgtctcttccttatctcaagtcgttgaaaaagcctgagttggccgagttggccgatcagaccgaactcccaaagtaagaatgaatgcgattgccgcatagactgagctgatcaaatctatagctacaatgactataacaagaatgatcttgtcgtagttctggacagacacctccgtgaaaaccgctcaatcttctccgggctcaagagtctctctgaatactacttacgcctggcctctccaccccgcagaggaggatcgcccgtgaagcgcgaatccgcgcgaaccccggcacgaaccccggcacgccgctctactaagaaggaagtgagggaagaggaaacggatgaaaataagtaagagcggcctcaacgcgccattcgatacatcgtcatcacgcatatattaacccacgcagtagcgaggatgcggaagaacccgagcccagcccaactgtaatcagcccgacaccagctgtggggcgcacgagcgcacgccagtctgcgcgccaaacaccccaacagacaccccgtcaaccagcagttctctctaccgtcgtggactcagagccatcgctgcccgcatctccagctgccatcaccgaagctatcgacgcacagacgctcaagttgcgcgagagaattgaggatgcatggactgcatcgggcttagtagagcgggcgcattctctgcgagcaacgctgagcagcgggaaggcggttgagatcatcgtgctgctgcttgaaagcggcagtcttgcgaaagagttgatcccgatacgcttccttaccactacaccggttgtgcaagccgtacagatcccggcgattcggatccgggttcctgatttatttgtgctgctggaaggaacgttctgggggccgttttcgctgtggttccttacttgtctgcttttgcctttgatttctgcctactttatcaacttgagctggaatgcttctagcagtacgcgccgcacccagtctgcgcctaatctcgcccagtttgatccgttgacgttcaacatcgtcaaagccttgctcgtgcacattgtgtttggcaaaggtttcaacttctttggtttctatagtcggtatgctattgggaaggtaattgactccgtccctggtggagaccttggtatcttgactggatccgctatcggtggtgtgactgctctgtacgaagctattctgcaccgcccataagcgacaggacatgacttttgtgaggctgtacaggttatctggcgaatggttcttcagtggttggacgtgttttatctcatctgtctccaccgttgttttttcttcgtttatgggttatgcgatatgcgatattgggtttcttttttgccttctctttatctttcttggtctcccgttatagccagagcaggcgccttgggagttcttattctggttcttgttctgatcatctctttgggagattcttccctgcttgccctaatgaccgattcattattttccagtctgtgataaaaatatccgagagtagtagtatatttatagtcaagtttacgcatgctgcggacggcttttgatgttggctcaggcctttgttctgtagataggcggaatgtcgtcaaacctcgcggacgtcgacgacagggttcttgacggtgcttggagtcaagcggttcatgaagagatcgaagcagaagcccacgggcgggtttttatattgatcaaaacgcgcatgggacacgcagcggttggtggaagcaaatttcacatatatgctgctatgggtgggggctgaatcccaaattcgcaatagcgttatgtgattctaacagcctaggcttcgtgaagcgttaggccccggacagactgtcgtggtggttcctattaacctccgtacccaatgtcatgcttcacgctcacggtcacctcttcaacctctccgccaattccactgtaaacaaaaccgggacagaggtctcaacctccaccttgtcggcgcgaatatgattgctcgtggatatctgccctccaatctcggtatgccaattctccacatcccactcaaagccatgggttgtgatctcggcaggtgacgagagggggatgatcccgatattctcttcgaagaagtatactggttctggttctggttgtcgcacttgctcctgctcctgctcctgctcttgctcttgctcgcgcttccgttttctcggtgacttgcttacattagaccccaacgctgtcgcgatatctgctcgtcttgttgcaggtgtgtaaattgtattcttccctgtttggataatgaacgtaatgctttcctcggagacgagatacaggttaccacctgcagctggcttggcatcagaggtgtcggcttcattttcacgaatcgagcgttgcttctgcgtcatcatgtacaagtggtgcacttgagagaaagcctgatccacacgaccacccagaccgccgaggatcacaacttccagaggtgattgatcagatggtgaggttgctgtgctttgatttgcgccattggtcttcgatttggtccgagtgtttgctctttttcggggggaagccatgatatctgcagcatgtacgttgagatatttcagacatttcgtgaagtctgttgagtattggtctggatcttggaggatgggcactccgagcttctcataatgtcttcgaactgcggggcggatagaatcaaggtcgccgacaatggagtcaggaagctatatctctggtcagctcgatctttttgtgctgcagtttagaataaagttgcagtccagagagattatgcaattaatgtctatatatatcgcttactgctttagatccctttccattaacttctggcatatcaaaaagccgattggcacctccatcggcgcaaataatataggatgctgcattggcattagcatcttttatccaggaaactgcatctatgcacaattcatatagaatcttaccatatctgctcaacactccaaaagcattctcattgattggctggttaaggatgagaagagcgtaaggcgaaggactcccctcaggacggaagaaccggctgggatcccattccattgcaagagttgaatacaaaccaaattgaagtccaaaagacgtaaacaaaccaagagaaatcaaggccgaaagggttggtggtgacgatataattatcttgaccaagctgcaacgtgactggctgacgcgggcacgcaacctcaggccaaaatccacatcgctttccaacttctccatcccgcggtgtttcgactctcttcctctcaatcccttcttggtggaactctcggtcaattcgattgattcgcactcctctcacacataatgttccgccccgccgctcgagcgctcgctcgcgcgcccgctgtcgcagcccgtacaccagcgaacagacgattgataagcaccggtccgagcaagtcgagaagctggaagaataccttcttgcgattaggcttggccggtggtgctatctactactacaacacgagcagtactttctccgaggagccgaagtgtacgtgtcgccgattggagttgggtgttgcccttgttcctcggtccccggggttgcaagccgcgacaatcccgtccccgtcaaggttctgagttctggaatcacaaatcgctaactctgcttccatttggctttagtctctatcctttcttcaatccggaaacaaaatgttgatgatgccaacccccagactctcgactccattactcccaggattcggcaagaacgagctgccgcgcaggcccaaaagaacgagtctgctgctttggaaggtggactgaatgcccaggagctccaggaggaggctggccaggaggctgcgttcaacccggagaccggcgagatcaactgggactgcccgtgtcttggaggcatggcccacgggccatgcggagaggacttcaaggctgcgttcagctgcttcgtctactccgaggaagagccaaagggtatcgactgcgttgagaaattcaagtatgttttactgtcgttttgagggcagtggtcctgtgctaacaatttttgcaggggaatgcaagactgcttccggcaacaccccgaaatctacggcgccgagctggaagacgacgatgagccccaaccccagtccgatgctcccccctccgaagctcccgctacccccgaagctccatccactgccgccgagctagatgcgtcgtcgcaccccactgagaagcagacccgcgccaaggatgtcaacacccaggtgaagaccgagaccgttgctgcaggcgataacgtcgagggcgacaccctcgttcccaaggccgagcttgacgtcgaggagaaggagcaggctcgcaaggcttagaaccgacctgcatcctgtttgacgccaccctccctagagacaagcctactgcttgatctctcttctgtaatgcatatcagggactgggattggacttgtgtattatatagacctttctgccatctctccatctcccgtactgccttcgatgcattttcccctcctgatctttcagcatatccattcccccgatctgcgctcctctgtgttcttcccgatacttcctctctgtcaatgtgtaacttagtgtactgatatgctttacgctcttgtcctttggacaaataaaagaaagaggggaaatctactagactttttgcatcatgactggtatccagtatggagcttttgtataagcgctagacaaggtgggtattttccgtggaaacttgttgaatatagatatcagtccctgcaaaccccagcttctcttgggagaatttccataacggaatattcctgttgcgagaaacgggagcgattgtcgcccccccccccccccggcaatcnnnnnnnnnnnnnnnnnnnnnnnnnnnnnnnnnnnnnnnnnnnnnnnnnnnnnnnnnnnnnnnnnnnnnnnnnnnnnnnnnnnnnnnnnnnnnnnnnnnnnnnnnnnnnnnnnnnnnnnnnnnnnnnnnnnnnnnnnnnnnnnnnnnnnnnnnnnnnnnnnnnnnnnnnnnnnnnnnnnnnnnnnnnnnnnnnnnttttcccccccccccccccccggtgtctctttcaaaagcaaaaaaaaaatgcatgatgctccgcgctaatagctgaagacttaggggaattaagggaaagagaaatcgatatcatagagagtagcattcccaatgaacgacgtcctctccgaccatctctgtccatattaaatatttagtaccacctgagaagtataaaaatgtagttgattgtttgatcttcctcttcttactattgggcttattaggccaactcgcattcgatcaagctctcgacactgtccagcggcgtccagattttagcaattctgagcccaaccggctcaataatttgtgccactgctgttcagtccgctccttagcagcaagatccaccatcattattaggtccagagaagtagcctgccagtgggccccagtattgggaacaacgttctcattgatcagcaacttgctgtatccgggtgtcatggcggcgaccaattgtgacaagattttctggcatatctcgtcgttccagtcgtgcaggacggagtgcaagaaatatactcgcgcgcctttggatatgtcagctactagctaacgctctatgtgtgtcaatccactcacccttgatgggctgttcttggtagaagtcgtgggccatgggcttaattgccgggttcagcgacttgatatcattcaaaacatgcggttggtcttgcaggatcaatctgcccggtgtgtttggccacttcgatacgaactcgtctagatcgtgccctttgtttcccccaacgtccacaatgaatacgtcttcctcgccggtctttgctccctcaatgagagtttgtactgggtagaaatttccatccatccagctaggtctaccttggtggtaggccgacatgagattgttgaactgagcgccgagttcaggatagtcggggttcttgccgttgaggaattcgaagaagggatactcggttttgaaccctagagtaaacggacagtctgtaccattggtgggacttcgataattgtttttcttgagccaggtgggcagcacattgattgctggaagggtgcatccattactgccagcggaaatcaaatcagtacaccaatatggacgggagaacgcctagaggtggaactacttacatgcacggccaagcatcattgtaccgcttaatagccaacgtggtagttagcccgttgcggccatactcatccataccagtttcgacaaagacacccattgtggcgagatgcttcatgatacgacctttgaaattataagcgtcataattatttgacttggaagttatcactgaccgagaagttcgggttccgcacctgttattgctgcgagctctgctaccgttttaggcttgtcagtctgcgctaatatgcagaagatccccagatcgatgcaggtttcaatgccggcaaacgctgtgggctattacgcataaacaatcgaataagcatccttggttcctgaactaagatctccgttctgacgtacctgggcccagcagtatcgtagcatggtttcctgtggcgtttccattgcctgtacgagagaccgggctgtctctagcagcttcaggcgcgcatcggcgttgccctttctgtaagcctgggaatgagattcaatttccttttgcaaatgcaccagtttctcgggagcgctgggtgtagtggcaacttggggatgaatagcaggtctgtttgataaaccgatgactgtcattttgaacgttgtccgtgaacttggaacaaacaccttgcaccgagagcaaatggcaacattagaacggaagtatgaactatccccagcatctggctagatgaggggaattgctgtctaagagcgatcatttgtgacaaaagtcccgatagctaggtatctcatacttagataaaaatgagtcaacctgctgtgggccaatgctataagaggttatcgcattgttattgtttattgtattcttcatttattcggcctgaaaaataatggagccagtccaactaaaccacttatagatgagtggacagggattatcccgtgtctactatttagtgtatgcgggtctacgatataggacgaaaacttgttcaatagactgggatccgcacactaaacccacttgcagttactggatggaggcttcgcaggaccatgatgcatgtcgctaatgcattttgccccgtaatttacgccagagcaggccaattgaatcttgtcaagattctactatagtcaccctcggtttcaatgctgatgcagatagggcaacaaaggcccaagtggccaactattcttgtacctatatcaaaagtgagggtgaatgaccgaatttcttgtcggaggtgatttggctctccaattggaccacgggagctataccactcccttctatcagtgagtcgtccgtgtctactgtccacttaaagttgggtagaaatattgacgggccttgtaatacataacaaatatcattattcttgtttaggacggcgagatggcacgtaagttgcgtcgcgccgaaactgagaacgtcgagctagtcactgggaaccaaggcgagatggttccagacaatatacgcaagaagattgactatctagcgtcaaatggccacatcttatccgcgctttccactatcatgtcttcaccgcgagactcagcgtctttagcagtctgtatccattcatcatacgctgcgcgatgaacagccctcgcagcatcctatgcatcgttcaggatccatccgtgagaatctgtatcaagtgtgttttttagccataattttagttcttaaacggactcaaaatcttcgtagtctcgagcatgctgctttaattccgcttctacgggagaatacggatatgagccttctaggcccagttttttccagctagtaaaaagttcaatcaattcttggcggacagcagcagcggagtcgctctatattatttggctgtagtgaaagagtcggaaaggagttgggtcaagtaatcttacagggcggagtttaggagtaaggcctgttatgattgtattatatatctggtagtagatggaattatctcttagttctctttcctactgcttagaaagtttagggtcatcttgatcgttctcggatgaatctttattaggaataactggaagtatagcaaaatcgggtatcttattggtatagataaacgcgggctcgacgcttattgattgctaatctattaggctattaataatagttggttcgttggctgagacgaagatattcctcttatagaagtctgggtagagaagagctcgttttcccctagattccggttctagaagaccggtctgcaatatggccctataaagaagacctgttcgaagggaaccttagatttagagtctagaggtatatctgcgaagtatagactcctataagctaggaagtccagagaagctatctttcttaatgttaatgaaagcgctttagtatacagtatatactgttctgtattcattataggctatacttggtatagttatatacccgctatatgctcctagatgatatattcagtcccagtcggattagaaggattatcgttctagtcgagaattttcgggataggaagtgagatcttagactatactataagagatataatgcagtaagtatatcagctatatcctggtatactaataagccttacaataagttattattacaacttcggagttagttgttagccctagcggactagtaatactcgtgggtatccttactataatgcaaggtccattgtccattattaaaagaaaaactcgactgaatccaccttcgcgcttcttatatttgataattttagttgctcctaggcatatgcgaatggcccgctcacatagcgctgagaagtcaaacgcaatatagcgcgagtctcactcgaggttatcccgattgagccatcttctaccagtgtacgaatgcggatcatcgcctttcaaagtccctaaacaattgcagggaattcaggttactactaacgaagagtcggctgttgcgaatctgttcctggggatgagctgcggggcctgggatggggcacaggggcgttggttttgtttcctatgtcagataatggtcgaatggagtaatggaggcaatgccgagtgattgacgagggaaaaccgaaccgtcgccagactcggagcatattggctagctggtctttcttttcttgggttcaaggttggatgctattcaaatctacaccgcctggcacgcgcctgtatgacgcgatcttaaagccgatgctataacgtcgctgtgacacgttgtcttgttattctcaaccctggatgagtatgatcggatatagaaaaactaaaggcaagttccatttggataaccttgagaaatcaattgccgctggtcatatcttagcatcatccgccacaagaattcggatacatttcacaaaccacttttagatctgatctcctttcgtgctcagagcgagaacctctgtacaaagcttattcaaagctcgtatgaatttatggaggctggaagattgtcccccactcgattggggcacatggagaggcacgagttttcattgcggtatactccatacttgagtggtcgtcctcgcagatctagatcttcaagagcctaggctcccaaaacaaggaacccaaagccagctctaacaattcattttcagtaagtgtcccacacagggactttaggaccaaatagaccgaaggatcttgaatttgcacactccaattacctacgcatatctctcctcagtccgacctcgggagatcctcggggcggttacaatgagtcaccgtctagtagacggcgtctacggtaccgcgacttatccaccgcgcatctacgggccgccagcctcggtcctcggcatagtaccaaagggccacgagtggatcattgagcaaatcccttcggtggatggcgagaataaaagtaaaacggttcaattatatcattgctctattttaagagtgaaacagcaaaaaaggagttgaacgcgcgcgaacggagtacgatcgttcggggcatattgaagcccatcgatactcagtatctgattttctcatgattacagcaagtgtggccaaaccgaggcggctggcggcgccacccattgtccggtttgagacgggataatcactcgttcgactaataactgtacacgttgaagaatatcattgggtaattgtaagattttgaccgctcaactggcaaaactgagaactcgtcgggtcataaagaatcacgagaacaggccaagagacactgaagaggtatggactcccaaaacgccgaagattgacaagaacgaatataacaaaacaagtttgtaattactcgcaccaaagtcagcatcgtaatttcagcatatcattgatgatgggatcatgttgaccagacaatgtcacaatggcactctcgccacattacaaatatcggtagagtgacagtgaggactctccaccttggaaattttccgtcacttatacaaacggaattaattcacaccttttaagaactcccctgttcatgcttaagggtatactccgtcgtgacccgaatagccatggggtcatgctgtccatcactaactcccaggccctgatttccctcaagaatatactcctcactttccgccccggaagcgcgtctcgccttatttgcattcaggacactgtccagctcaaacccgccactcttccgagaccgcgacgaaacaaacgtcttcgtcttcccggaagttccattgcacgcatcactgttgtagtagtggctcttagagttcttgcggttcgtcgagcccagccagcgcgtgttgcggaagagcggtttgatgccgggtagggagacgacgatggctgcgacgaagcattcgcggtctgcccagccaagtgctgtgccgaggtttgtgatcgatgaaagtgagtagtaggcgcgtagaatcgtgcagatcataatgaagactcccgaggagaacatcacaaccaggattattttgcgttcgattgggatttgaagtttggcgaggattgggattgggatgaggagtatgcaggtgtcggatctgtttatcatagtgttagtatggggttctgggctctggggccttttggaggtgacttgcactacgttgaagacggcgatgacaatgtaaagaggtccgcggagagtgcagttgtctgtttcggttagttggctgtcgggtgaataactatcgagacttgcctcctgcgtagggtttgatttgccaatttcgctcaactggcctgcagatacagacatgcgtcaagaggcaaatcaaccaggtaatcaggcaaaatgctgcagttgctgtaactaggtgacggtgccaggttccgtgtctgtgaagtcttagatatgctcaatagaccgttgatgggtgacaagttgacatacgtgagtttccagtaaagacatagaagaacaccctttagacaccaaatatagcagatgtaccatatccagttcatgaaagtcagcttcgatccgaggatcatatcagatattttgctgtctgggacaagcatagctgtttgctcgtctagtccgatgttgtttccatacacccctatctcaacgttagctgtgttgtaaggggtaattatcgttggtatttacccagcagatagatgatagcagtcatcgtggtccaaaatagctgccatgacactgttaaaacaaacctagtgaagcttggggaaactgaacataccatgccagcaacagcaaaagcatcatccagctggagcccgcgaaggcctcctatatttagtcgggcaaatagccggactaagaggaagagcatgccaattccatattcagtgaaagtctcgactgtcaaggcatcggcggacatggtgaaaattcaaaacaatgacaatgtccgttcgtgacaaaagcaatcttggatgccttgacaataagatataacactatggagaaaggatctcccgatattaatttcaattgatcagaaacggtgcgatcagactggatctatcacctccagcttcttactacaacataagcctcgctaggtatcttcgctccgatctacttcaagatcaggccaaaggtctatgaaacacatccgttgtaggatcagtctctctgctgttcagttcaccaaactcgagggatttgtcgctagcataaggtatcgtcggcaagtgatagataatctcgctgcttataatcactctgatgtcgcggtgattagggacactactactctgtacaacatgccgatattttccgcaatcgtgtggcacattcctaaaaaagatttgacagggatttgtgcaaggattttagcaaggattttagatttttctgacagtaatacccttgtctaagtctaagatggcaccaaatttactgcaggtgtaatgggacgggaactacggagtacggagtattgccccgcgacaaaggactgagttgtggattcaaggacttcgattgtcccgatttcaagaatagagatccaaaggatagccgtgcatctggggcatatctgatttactccaagtcaagtattgaacagcttatacctcatctctcaaatatgaagaatccaacgaggggagctgtcaaaaaaccgaatgttacctgacaaataatagggctgatcttttcaggagcccggacattgcccggactgactccgtgagagattattagctcaagaaataattagagctgtggagattgatggcaaagacaatcacaacccggtacggattcattgctacacagccatccgaagaacctacgaatgatataagagttctcccaagtagcttgatttgaaactcatggaaatcaagaaatctctgggaaatgaccaaagtcgcattaatcacaggaggaggtgtgatgagcccccgcataaaactcacgaatgcaaaaagaggctaaacttaactaaatacacagccagtggaatgggcctggccgtggccaacgctctatccctacgcgaagactgggaaatccacatcctcgacatcaactcggagcgaggagcccatacagcaaaagaactaccccggacaatattccatcacgccaatgtgaccaaatacagcgaccttgcagccgcgtttcaggacatgttccagcggcatagcaagctggactttgtattcgcaaacgcaggtgtcattgaacgcaccaacttctactccacgtcacaagcagagaacagcagggatgtgtgtccaccgccggagccggacctgctctcgatcgacgctgatttgaagggtgtcatcttcacggcttacctggcccagcattatttccatcactcgtctcacagaggccgagactcgagcttggttatgactgctagctgtggtgggttgtatccgtctttctattcgccgctgtactctgcggccaaatgtgagttctccacctaatttgtacagtatccatgtactccgtatccccgcgtactattgtaccgtcatatgatatcgatgtgatctgttggctgcgatctcatatcatctacaatgttatttcttattctgctgaaacgaccgaaactaacacaatacagtcggcgtagtaggattcatgcgatcgatatcgcgacacttccacgcaagcggaatccgcgtcaacgccatctgcccaggaatcgtacgcactaatctagtcgactcgacgggctgggacagttttccgcctggtcggttcatcgatgtggaaacgatcgcccggctagtgctccagctcgtggatggtggtgaacccgcgggccggggactgactgatacacccggcaggcatctgcccctggaggagttgtacggagttgcagtggagatctcggatagcgggttttatttccgggatcagcatgtcttttgtgatgatggtatgcgtgaggtgatggaggcgacggtggtcgaaaaccaagtgggtgctgttctcaattgttagatggcggaactggttccgtatggagatataatatatcatgtcgtatgttgcaagatcatcggtaccacttaggcaaaattggttagccttgtaagttgttattggtgctggtgtttagatctctgcgataattacataattatccccgttacgatgttggagtcttcgggcttgtctgtcatctttcttttgagcttcctattttggagattcattatgacagaacaaaataggccaagtttcaatgaaatacagtcagaaaaggggaaattctacagaaatggcccccaacgagaaacacgaacagaaaaatacacgggaaatactccacttatacttgcaggggtttaagcgagtcatcgatttggaacctcctttgcggatttatttctcgatcacatggaccaatcaagtagtgaacgcgagattgaactcgatcgactctcgtccagtttatgttttctaaccataaatggcatggacgggccgtccgggacgagcgccacttccttgaagggtcacttttacaggggccaagtcacgagcagagcgttgaagcgggaaaaaacacgggccagtaccgatgagagtggatttcgatttctcagggcaagagcggcagcaccatttacgagctctcactcagatattacatgtgatagatcacattttccgccgttggagacccacgcggaagagaagacccctgttgccgcggacaagacgaatgcgacaatacggagtcgaacaaagctattattggctcgcttgggctttgagcttgggggtgaagatcgtcgcagaccgtgctagtggtggagcctatctgtacttttttatgacgcttggcccgttagggcagtagtactccgtgggtcgggctagaatagatgaaatgcactgtattatttcctacaggtaactcttccgatatgctcacggaatagcatccggaagcccagagtcttccccgtgcatgatacgaaacagtggctcccagaccgtgacagcccgcttggtgatatggccatttccaggttcaggcatctggtagtagatcagcttgtcggctgaacactctaacagctgacccgacaggccggtcgagtcttctaggaaggtttcgtagcctttgagaatggtctgcacagaggtgagactaatttcaaagtgatgtcagtgttctgcaatgttcaagagcaacacaaaatcttaccattcaggcgtgacagcggcaatcatctcgggtggcacaataggcgtgctcacaatccccggcatgacacaattgatgaaaatattctccttttgcttcagcaatggggcaacaccccgtataaagtggtttaccgcagccttggagccacaatataccggatacgactcgtggggaaagatcgcgccaatactacccgtgacaacaatacgaccaccaggctgcgggttatggcgcatgaaatggattgccagctgggtcccatacacaacgcctttgtagttgatatccacgacagacaggtccggtgccggcgggatgttgtcgatgctgttggtcttcgcgtcgtagatgtagatagaagatgtatcgacaataccggcattggcacataaagcatcaatacgcccccagaggtgatacactttgctgaatacactcgcgtattcttcgtagttggagacatcagcggcgaagaaatgcgctctgtcttgcggtaggtcttttaggagggcttcaccggcctcctggcgccgacctacacaagcaaccttccatccttttgtgcagaggtccttggcgagatcaactcccattccagactgtacggatctttgtcagtgactgatagcgggtcctgtgtagttggtttcgtactgacagtggcccctgcgacaatagcaacccgtgtttcaatatgtgaacccatcatacgagctgagatgcgataacgtttgagagttaatgaggaaagaataacttttatcgaggataaaagaaacgaaagtctaccggatcatagtgtacgacttaatgctcgggggtttttcctcatactgtagtggatcctaagccgttgggaagcccctctcctcttcatataactaaagtatggttgaagttaattgttaaaattgtttatatttcctttccccccttttccacccattgcattattgtattgcagcatggctgtggactcagaaaagggttcggtgcaggctggttctccaacggagacaccaagctcaccttcgatttccaatgaaataactgagccagttgtcactttaaagacatggattgtctcttcggtatgcatatgacaagtctactatggtgtgcatgctaatcgcgcatagattctttcttgcggttatggcctttctttctggcctattcccgttgttgcggcaattggcagcatggtctctgctgacatgggtgatccgactggatatatctggtttatcccagtgtgtaaagatgattcaaacgatccaatggaaagtactaatccaattacaggcttggactatctcgatcacctgcgctttcttgatcttgtatgtttataagatatatcttcaaagtccaaaactaattagatttcacagtggcccgaatactgatcttttaggtcggcgttggttcttggtgttgggcaatctggtaattcgatcattgcaaccaaatacatggcgcgtctaaacattcctttaggtatgcttcgtcggtcatattgtggtagcatcagcaaagaacaccaaccaaatcattgccgggctcgttatatctggtttcggcggtgcaaactgtcaggtatgagcccgattatacccatctctcctcaagtggaccagctaaaagatcattcatcatatagatggctgcattcgcgctgccagaactcctccccaataaatggcgacacatcggagtcgtgatcgccgatttcacagtctatatagccgtcattgtcgcaccagtaacagcccgctacggctacgagcttggaacctgggcctggaacttctggggcgtggccatcttccaaggtctatcattcctcggcctgttattcctctaccacccgcccaagcacccgtaagcaagcttccaagcctaaatccagtgaaaccaaccaaactaaccacacacccagcctcggcatcccgtacaaagaagccttcaaatccctcgactacctaggcgccttcctcttcatcggcggcgcagtccccttcctaatgggcattgtctgggccggcgtgtacgactcaaacgacgtccacgtcgttgcccccctcgtcgtcggcgcggctgtgctcatctgcttcgcgctgtgggaatcctttggcaagctgaaatacccgctgacgcccacctatatcttcgctagctcgtggggccgcgacttcactgcgcctgtcattgcgctcggcgtcgtcaatatgttctactactcgtctagcatcctgtggccgcagatgatcacagtgttctacacgaatggcggcgcggactggaagtactctgtcattctgtcgttgccgcagggattcgctattttcttcggtgctatccttctcacctgctttggtagtaagctgcggcattggcactggcagcttaccgggtcggtgtttgttatggttgtttttggctcgttgcttggtattgttacgccgactaataaggggactatgattgctttcatcttcctctctcaggctgggtttgggtgggctctttatttgagtattgcgattacgcagatgggtgttgagcataagaatctcggtgttagtggtggtatatcggggtgcattcgctttgctgctggagctggtacgttttgactttattactctgtcgtgttggatcatgctaatcctcgcctttagttgcgacctcaatctaccaaacagtctacagtaacactctggcgaaatatacggctatatatgtcccttccgctgcgatctccgcaggactgccggagtcgaaggtcgcagacttattggctgtggtatctcaaggtgccgcggcaatgaaatcatatagtcctgccgtggtgacagcagcagaggcggctcttagtcaggcctactgtaaagcgatgttgtaagcacacatactcacatatctcttacccgcactcttcgcaggaaacagtaggaaagaattgtttctaatggtttcttccagtgttgtggctatggtatcgatggcgtttggcatcctgggtcttgctgcttgtctatgctgcaaggatgtcgattcaaagatgaccaacaaagtgagtgacgtcattttctactcggggatatatcaccgagaaactaatgggcttcttttctttagatcgaggtgtatcttgagaacacagatctttcggagcgaaacaagtatcattagattcaactgtttgagcgctaatatgctagtgaaataatgtgccgtctagcaaaacaactcagcatagcttttgagacaaatgcattcagcccaccatattaaggagaggtcagagggcaatttaacaccattacttgataaaagcaatcccttcgtttttttatcttcgttcaaagagatccagttacattgattgctgctagacaaaagactagagatcatggctaaaagatacacctacggcataaaattgatatttgtgtcatccagtctgattcattctctacttctcggagccatttgaacaccatcatccctagatcgaatagtgtacgatcttcacaagagggcagcaaagtggtgatgtctttcgccaggcaattgatgattggcgaccatatcgggatttgggtttctgtatgcgggtaacatcgagccctcgacccagtccaggaaccccaatcaggatgggaaaacgattaaagaaggatcacgggcagcaagaggagtgcatccatttcgatggcattcgcgacggggtagattccattagcaagaacggattcctggtcatactcatacggcattgcctactcgcgttgtgtgcgacgtcaaccagaaataagctcattgggttgaaccaagagcttttcacactgggtagtgcagagacgaaagaatagatccacggtgggacggccgccttccatgggggaaaggcgctggctgttgtgtcaagtgaagatatggaatatggacctcagtccagatagtggcagcattcattaccagttgacgtcgctgagctggagcttgcgggaacggaaggcggaccggttcgcgccggccttgtccatccgctggctggcgggggtgcgcttttcttgggttgctgctttggtatgtctcagttggggcttattcgggttaactaggggatactgctcactctcggtgggttcgggttcggtcgacgcctcgtaattcaggaccaggttcttgatgcgctgctgttcttcccgatcggcttgttgctggctccgcatggcaatagcaaaggtcgagtccgacgggagatcaatggtgcgggtctagatatgattagcaatcggcataatattgcgaacgcggatggaaaatactacctgttgcttgtttcctttctttgtcatcagggaaaaggccattgtcttaggcgcaactggttctgccggtactggctcagggctagactcgctgggcatgttttcccggggacgtttcatgggaagagggatatcaaagacagtcttgcgttcaaaccgtctcgagtccatgctttcggccatcattttttcgaattctcgatcaaattcagcctcggttactgggtcgcgctcctcttcctgtctggtgacaacgatttgttcgtcctcggactcgctatcgctgtcgtcattggcctccgggttgggtccagacaccttcaacgggttaaacgggttaatgggtcgtacttcatgtagatgagatgggggacctacttcggcctcatcgctggattcctggtcctcgtctatttcgggaatagcatcctcctcaagatcctcgtcagaagagctgctctctgcgtcttcttcgtcggcttcgacgggtctctcggaatcctgtacgttgtagtttaaggcaacagcttcgctgaaaatccgggtcgcttcttcaccctcggtagcaagcttccactgcgggcgaatagagtggtatgtatcctggacaaggaagtcgacatccatgggcaacggatccttggtaaataagtagtattgcaagaaggcaaggaagaaatccaatttcttcttggcagagccacggtcaaagcagtggccacacgtgtcaagaagggtgcatgccaggcgcaagcggaagtagtcgtctggcaagtctagcatactgatctttccacgggccggagtcccaccctcatggccaaaggtgataatgcggtacagggtatcgaatatcaccggggaatcaatcatcttgtagttgtagagctcacctagatatttgatttctgcaatacgcttctggttaaatttgaagtcattctgctcgaggccaagcgtgacctgctccaggacattgtcgacgattccgatcacgaaatcctggtggtaccggtacaaagcactgacaagaattgccagaaggtgaatgctgccatatttcactttcaccggtttgctgaacacacgttctaggatctcaacgacctcttgctcctcccagtgaagtttgcggatggatttcaagatcttggtgtaattccgcttgttcatatccaggtagattagtcggcgtatgtactgctccatgggggtacgttccttctgctggatcgctgggcgcggtgggggatcaacatagtagatggcattttcgataaccatccgctcctgctgggccagatgttgcacggtcttcttgcgactcaaggtctcgaggaaagaagccatccggggtgacgattcgggattgcgcaggagataacggccgcaattctccagcaaatggccgatgatttcaatgttcatgcgcgaaaattcgtcaagcgaaaccttgaaacaatggaagataatatgctccggaacgacaccgaacttggtcagttcagctaggtagcgaacattgctcatgcgtacttgaccgaggaattccttggactttcgccgctgcagacttcgaaattcttcatcgaggtacgtggtcagtccctgtggaatatctggcaggtattgtccaagcgttgctaccaggcgagaatacagtggcaaaagatcgatgcgacccttggggatgtccgacatagctttgataagcctgtttcgtgatgctttggagttgacccagcagaaatccagggcaaactggtcgacttgatctttggtttgcaattcggggagcttggcaagaagggagtccacctgagcacccacagtcttgctggcaatggcagttgactggtcatcagcctccgcagcggccttctcgtccgaaggctctccagagtcggcggtttcaccatctggcttctttttaccagactcctcgccttcactcttcttctttttgccatcctcgagtaaaaccgcaggtaccttgcccttcagatcgaccagattctcatagaaacgtctttcctcctcgtcttcccaaatcccagcgccttcaccttggcctcgtaagtaatcagtagtcttcacaaggccaataccaccactggcagaagcatcggtgggttccttctcggctagatcaggcatgtcggttcccaaagcctcacagagcacctgcgtattggccacgagcttttccaggaccttggactgcttctcgaaattggcctggcggtcctcgaagatctcaccactcttcacgtacgcttcggcattacggcggttttgctgtgccagcgctctctggtctcgaaccacgtgagccttcacatcctcaaggtaccggttcaagatatttctgaaccgctgctggattttttctggagtcaggggcaaatcggtctccgaggacccattggtctccgtagtctgcgcctctgcgccagagattgtagtagcgccatccgcctcaacagttttcctgccatcttcagcaagcttcgagccgacgatatcccagctaaagctcttcacaaacaagacagcaaggggcaggtttgtatgatcacggtcatgaccgagcaattccttcagaacctccaatgggaacgggtcagcctgtttgtcctggtccttcgcgcccgcggcgggggtcttggccttcagcggcgtatcggacggtttgttcccaatcccaactgctccctccttgcccttcgcacccagttcctcaggtcgctcgacgtcatcgagagtcttcagcacattgaccagccaaagctccgtaaccacgcggagaagaacgcggtgtcgagacaggcggtctttctcttcgcgttcacgaatctcctggctgagcgctttgagctgcgctttatccggtgtactcagtccgcggccgagcagccagccgatctgtcgtgtgaattcccaaggcccaaaacgctggtgaagcgcgctcacaacctcgactccagcggcaatttcaccgggggatttgagcttgcagagtccttcgtagcaggcggaaatgatctcggaaaggtatttgtggagcgagagggaacggatgtcggcgaggaaagtagaaagggcggaggcactgatgccggtgcgtagacgtttgatgaatgcggtgttcttcttgagcgcggagtcaagggacttgctagtggggaatacatctagttgcaagtggttagcatcatctcgaaggtgggctgcaatggcatttcgtcataaagggagtcagatgggattttaccagattcgcctgcccaggctcgctcgttcaggtcgcgaagctcccctgcaataagaacgcgacatgtcagtcaatatctccaaggtgaggtgtggtagcccgtacttttacgttggcgatccatggctacaagctcaatcgtggggtcctttctgaatgtccgagaggaaagcgcataagtgacgtgaatgccacattggggtaaaaggagataataagagaacagcaccaagctcaaagctttgaagtgaagcgaagccggtcgaaggtctaaaagtccaaaggtctaaaggcggagagcggaggtgaaggcggacttttatttgcttatccaccacttgtgcgataacttcttgtacctacttcacctagttactttcatctcttaacccctttctcgtttctcgtgtgtgttctttgaattcaaatttcaagtttgagtccgagttcgagttcaatttcaatttcgccttcaacgccttttgtgattcgcaatttacaagtctatcaattcattgtcccaaaccccccacttcgccaggtcccaccatgagttataatgcatcaaaaggacgatcatcgcagcactaaatgctgtttcgggctattttgatccccactatgcgcctctgtgaacccggtttcccttcccttttgcggcccttgcaatcgtttctgcagctggtgtttgcggtcctcgttgctccagctatgttggcgagctaaagccggcttccagcacttctcacatagttcctctgtggtgggacccggtgacccggtagtgtttgaaggactatggctctgagcgaaagggagaatgatgatttgttctttgctggctgggactttgccgtggttatcattgtgattgtttgatgccatttcgagtgtggataagagtaatatgtagtagaattggacgtagatggttgccagtggctggtttgaagctagcttgtggtatagaggagaatagtgtgtggtggagaaactagtcttcgtcttcagtatattcccagcttatctgcttgtccttttatatttcttcggtgcggggtatttaaagtctaattgtcgtgtggtcggatcatacggtattcggcaatggtgatccatacgtccatggggatcaaggacctgtcacaacaatcaggtatttgatatgggcgaaagtggtgacgtgcgggtggcgacgatatcgggtgggagtggaactgacatggcagttgtacaaaggaacaccaattccctctcgcacaatagcaatataccaagaattggaagtcttggcagtgatagtatacgtactcgtacatgagcctgtatttgccgtattaccggggatctaggcgagtcgaatgcttgatgattgcggtgattgattgtaatgctatattctcaaccggacttcattccagctgccaagacataacaactatctacggacagtatcaaggtaattgttcgaacagatatattgaaattgacgagctaacatacagtcgtgagtacgttcaaccattggaaagcaaacggacaaatggcaaaaccaacaaggcaaaagcaaaggtaggatacatatagtcgaagagcacgtgacttgaacagttccttctggcagggtcaagctggtgaagcatctctccaaacagacatctgtgacacatgagagccggtatcaggacaactgatatcaaggcaaaaaaaaaaaaaaaaaggccaatgatggccaaaggtaacatgacgcgttgagaaaccaacttcgggatatccaaggcccaaaacgatatagacgcgcttttgggagaccagagtatcgtacaggttgatggtataacaaggagataagtccaaaaaacaggggggggaaatggcatacaagaaaaaaacaaggcaagaaaaacaacaaggatgttgataataatgaattaaaatcagggtatgcctcacgccacgctatgcgagtccccccagcagccagggagaccaagaatcactggaaatatgtactgagaacatccatccgacggtggaaagacataggaactttttcggtcaatgattcatttgggcttgcgccagaagtattgctagacacaagtcagcggggttcgggtacatgaatagatgtatagatatggaggtactcaccttgtgctgcttccgacagttgcgcaggcctggtttccgaagatcatccaccacagcagatcgtcgcatcgtatcatcatcctcatcgggaacgtagtaatattcactctcaagtggcttgccggcggcatccttgccttcacgggcaactctgccaataaacttggtcgattcgagaatattgcggatatcagaccgggacaggccggtggggtactcgtgtccggacttccagtacgcgggagggagattgttcacaatagtggagaagggcgtggaggacagtcgggagaacgcaagttgattggcagcatggttgcgaactcgctcggaccgttcgtcggtatactggggtttagcctcggtcgactctacttccctatcctcttggaccgtagctggctgtctaggggaccgggtaggttggagaggttgggcaggaagcaggttgcgaggagaacgagtggtctgaacgggggaatcacccgcccggaaagaagccatacgaggaagaaggttctctccgaatggtccaaaggagtgaatgataggatcattctcttcgtcattgtcggagaactcttcggatctactcagttcactcaactcgctcgcccgcgaggtgtgaagcatagcggtagcacgacgggcactctgggatatcactccagtgacggtgttgtgacgcttcaatggagagggctcatcctcatacaccactactgcagcacgggaacgagaaggtgtgaagattggcgaggatggggggatggcatgctggacagcaggcgaaggggagacgggcgatgccagacgctgacgatccaagagcggactttcctgcggctctcgtcgggattgacgccgctgagttggggttgcttcatcactggtttgttccgagtcggtagaagggcaatcccttcgttcgctgcgaggccattgcaccagaacacgagcctcgtggacatctatcatgatatctgcatctttaatgtccgaggtgaaggtctttcctttggccaagtcatatttcctcccttggcagtgaatctttatcccattccatcccatgcacacgatctcaaccctatcccgatcgaatggattcggagccggcttatatgtagccttgacatgaacacgagagatcatacgactagcagcaagttggtgatggcatgagacactggaccttcccatcagaataggctccccattctccaacaacattatcgcaggcacagcagacaaaggcgagcgttccagggcagcggagaaggaccgtgacagagaaggtcgggaggcagcgacgccacgaggaggcgaagaggacatgatatgggtcgacgaggtcgggaccggagtgggatacgtcgagacatctggttcgcgtgctacacgcttttgaggcctaggaagggagggcgacgagctcggctcaaaggcaggcagcagggctgcaggacgtttcacgcccaagatcgagccaactcgactcttcaatggagaggactccatagtagaaaggtgggatgaagtcgaacgagcactcctactcacgaaaaataaaaaaaaacctgagtcgaggtcgaggacccgcgtctccgtgttatacaaacacagagaggaacctggggaattttaaaggaaagaaagacagcaaggcctcccctagagaaacaggtgtggtgggagtaaaggaagtagtcaaggagtaaggaggagaagcattgaagaaaaaggtcgaaaggtgtgtggtggtggaatgccctggggcggagggtctcgtccaccctgcgcggaaatgcacgcttacagtccgagacgcgttcgataggcgccaaccacgctccactgcaggctcgcgatttcaattgctgtctttgtgtattgtacagcgaatgactcgtaaatagagtgccgaaaacgtgaaaaagcgcgaattaaacgtttgtttcctcttaacttttgctgtcaactctatacactgcaacgcgtccgcgtctcaaaacacgtgaccccacgcgagacagtaaaccaggtttattgtgtcaggaatggtattcatgacctcaaaattgttcttatttaccctgtagcccctcggacgatttcgaaaaagcgagtgcaacttatatcccctcttacatagtacgcctattcaagtatcaggagtcaatggtgaaatttaagcagtttctctagactcgtacatagctaataccaagtactagggtatactccgtacggagcagaattcatacaattcccagcagaaaatgcaagccccctaattccccctaaccccccacttactttacggaattgatcactggttacctcgtcgcgtctcccagccattgcccgaccacctcggtatcattttagctcgagctttggtcattccaaccgattttccttccaagggcatatgagcgaatgtccagcctgatcaattacgggaaaaaatcacgaacgccctattttttgcactgagttttttgttgacaagtgctggtggggcctcgggtagtttgattttttggtatattttctggtatagttcacttgaccggtcttgtacgaaaccgagcatgaggaaagattttcttggatgatttgcgtatctcaatgactacatgtcagctgtggagttctgcctctcgcgaaaccgatccccttgcctaatacatatatgggtctaacgcatgtgggctgtctgacggacggttatatcaaacggtacagtggaaatccacaaccagaggtattacataaagactgacataactaagcttctacgttgtactcaagttctatagtgtaatattacttgttggattgaacttttggcccgcttacctccccgagctgcggaatggtattcttcgcttgggtcctgtatagatatatatatcacccttttattccaacttggtcatttttgcctttctagtgatcccaaagccggcactcgatcacctcaatcagctttcatatggtgtttctttggaatcacagtgtcgctcccgtccaactaggtctgttcaggctcttatcattcaaagtttccaaaatcaaaccatgaactctagtatatgggtctttcgaaagaatactgcatcgatctcaaatatctaaaagatacctgccgtagctcccatatgagctcgagctctagctgtgacggttggttgggtagcgggaggcagagttttcttctcctcgatataaatgggatataaatcactccagcacaaagccacttcttagcaagcatcgttgccgaaatcaactagagccgaaggttggctgtcggactgcgcgccctctgcaatataacccatatgatgtcagtaatcgacagagacaccaagtgactccacctatcgcactggtagcatataggctatagctcagaaactctggaggttatccatgttaactggccgttgacaagaagattagctcatccattatcgaggaaaggtagcgtctatatgatgagagatcttggaatatgacttgtcagggaagtattcaaatagggagaccatgccttggttgggacggtcctagagaattttgctaaatgcgtcgtcatgcaggcgcgccgcatcgctcatcgtgaagcatatactagctaactaggtaggtgcatacttcctgaaagcttttggttttgtttgaaactcgaaggaacgatcgaggtggggtcatagatttggcgtttcatcatgtatgcgacatgtcacatatcctaagcgcttgccgccacattaataattagcttgtccctcacattgtggggaggtattacaaatatgaaaatacttaagttcatatgtcacacatggttcactggcaggttatgcaacgtgaatcttaagaaaggtctacattgactgtcgttggaatatgtagctagctctggtgcatacttgattacgcatacttgattatgggagaggaaataaaggtgtggaatatcattcgaaggatagtcaggtagaggaaaatatctgactcaagacaggcagtgcacatctgctagactagatcactcaagagcggctagccgatgaccgactgttacagaaccagctgtgtgccataatttcccccgttgaatcaacacatacactcgaacctttcatttcaagcaaggcacaggataaaccaagtcaccaagagtcaaaagagaacatcgggattcgggaaggaagatccaacctctagtcaccaggacaaaggtgaaaggaaagggaacgagggatagatttgaaatcaagaactgattggtacttgaaaataaagaaggaaatctaaccgtcaaataaaaaggatatcgctcccatgaatgtgcctgatctgggggggtaaatgtggtcataagaaataaacaaaaaaggtgcaacgagcattggatttcgggcccagtcacacgtaaaacaaaataaaacttaagatacacagaaaaaaaaaaataatgatccttcgaataagaagccgtgaatatagacagatacacatagggaagtgagatgagagcggtggctctgctcgccctagtgcatgggaagctcatcgaatttcgcttggcggggtaaggactgccgccgaccaaaaagcgcttgcgatatttagtcgtagaagacgtaataggccttgccggaggtgacaccgacctgggagatatcgttagtatggaaatttgtacaccggggggtttcggaaaacttactgtgcagccgctgttgccgctgatcagaccgttggagtcatagaacttgccatcctcgtaacggcactcatcactgaggtcgtcaccctcaagcttaacgttgaagtcgagagccttggtggtggtaggggtgttggggaagatcgacaggaactttccggaggaggtgtaaccgacacccaggttaatgggagcccagttaccgatggactcagtgccgtcaccccactggcaacccttctcagtagacacacccttggggttgacatagtactgggcggaggtgaccttgccctcccagaggaagtagtcctcaccgtcggggcaagtcaggtcgtgaacaacaccgggaacggcggagagaggaacggtctcagactcggtaccggggtagtcagtacggcaaacggcaacgttgtcggacatctggttcttgacgtggacaccgccaacaccagggatgcaaagctgcttgtagttgtcgttggtgaggtagagcttgttgtcactcttacattggagaccaccaacggactggccggtgctaccctggacgctaggccactgggacttttggtatccaggtgggcaagcgtacgagcacatggcaccgtggtggcattcgtcaccagtaacggcagtcacaatgtcgctaatcacctcgtcaaggaaagtgacatactggataccggagtaaccaccaagacccaggtagtcaagggcgatagcaccgtaatccgaagggaagtcaccacagtcaatctctccatcagggaagtcggcggtgaggccggtggcaccagggctggaagagctgctagagctgctggtagcagcagcggctgtggtggagctagaggtggccacggctgagcttgtcgagctggcgaggatgatgacagccgaggtctcttggaggatggcaggggcaacagtagcggttgttgtaggggcggacgtggagctcgacgcggaagtcgacgtaggtgcggcagagctgctagatgggcaagcagcagccacggcagagtccagccactcaaactcatggtttgcgagaccagcacaggcttcctcgatactgatcgattgagggtcgctcgaactggacgggtccattacaacaaaatcatacacaactggaccggcgaccgaagcctcggtctcagcagcgcgcttgtggacgtgaccgtgaccatggccgtgagcggccgcgaggccagccgtcgccagcgcagcaacggtgttctggaacttcattgtagtggtagtgcgaaactgttgatcataatgtgttagttgagtcaaaatccatgtgaagttcttcgtgttcaatgattccccttggtgtaaagcggcttggacgtgattcagtccctgcagccatatatcgcgtttgttgtgtttcgaatcgtctgtatagttcccaaccgacgctcaaaaacaacaacaacaatccacaccacatcacattgcgaaagctattgcaccatatagagataaacgggaaatagcacatacatcacttcaaaggtagtcgcgcgtttgtcggagtcgagtaaagaacagcggttttcaaatgaatgtggagagaacgaatccctcgggtgtgagaaaacttcaagaaaggagggctgtggttggaaagactggggaagaagaagtcagggagagacaaaaaggagggggggcgattcggtttatgtccaaatagcgttagcgtgatagtcacgggaaaaggggcaggtacgggatacagcttcaatatacaactgtctcacactgcctaccttggtagtggaccctggacggagtctggatgctacttgttcgcttggcagataccatttaatctttctaggggttcattctatatacggagcacttctaccgagtcagtctctctttcttcatctggggagttctataacggcatgatccatgggcgaggcagttcctcttttttgtttacctttggtccctgcggcttggcgccaaagcgagattaaactgccaggggcagccaatcagaggcacgtattgcacttttctgggccccataattcaggtacaccaatcagtattcagctggtctgccgagattccttgcgtatccatgggtaccagaagcatttgatgatgttcttcattttacttattattatgtctgctttgttcaattcttgaaaacaacatcattccaacacgctattgaagttactccccccttataacgttacagctctttgctgttgcatcctaggtaatcattgcagggagacgcttgaataagactttcaccccctggcagccggacaacctgaccgatctacttccgcccagcttttccaagacttacagtgcggtgtgcgtagccagcaaggggatttcccctgacgatgctagcgtttgccggttttattattccactttaactggacacacattctagcctagtaccaataataccaagtttaataacataccagatctgacctgctcaatgcgtcgcaaataagattcaaatatcagcccacgacccaagtactatacaaataaatacctagagagtcaggaggtctagaaaacggattattcatatcgttggtccgctgtacttcatgagtagactttcacctataatcatagcccgcagtgatgacgactccgcgcatgaactgcctaaattcacgcacttctccatactcctctagcagccgagagttgctccgcccatccactttttcgataatcggccagccagtggaacaatgataggcgagttacggagtagaagccgaccgacttgtcaatccgccgcaatctttattctactgtttggacggcacggcctggtccgcgtcatagcacgctctagcagacctctagaattgaatcgaaattacactaaagaaattacactaaatttattgcatcaataactacgcggaaaaccgacagcttgttttccatacaataagttcggctgaggcgggtgagcatctgattaagatattgcctttgtcttgacgtactccgtagtcgattcacaattgctacatgtatccaagtaagcaaccagagccaacaccatcacacctgccttttcgggtccaaatattcagctccaccgtcctccgatcattccgattctttcatctttgttttcagctggtgcctgctccaaaaattgtaacctccgtcaacccaacccctgtttctttgtttgtgcttgaaagcatgttcaggtatcatacgttgtataactatgatacgaagatgtttacgcagctctctgggttatgtacgtatggagaatattatagctatttcgacaaatatcataccgttctgctaacattcaagcaattttatatattaaaaacggggctttctacaatttggcttctcggggaccaccgttcgtatcagaattaatttaatttttgtaattataggctccattttcaattccattattgcggcttacagagtactaatgtggagctgcaatggatggactctcactagtagtacggagtacccaacattcattcctaatcgtgtgggttttcaatatctgttgtagttacagcatataatatagcatagaagtacggagtacgaacctcggtaataatctggcatcccacggtcactcccgacgtttggtcttacaatatatgatatattgtggatgtggagtttcgctacgcttacttctgtgtcttccgacgtgcggcatgcaatttcccatactcagtcacctccccatcgctgcacattcaaaacatccggcttgtttggatgctaaaatagggtcaagatgcctatcaacatatattaaaacaacggtttgatctacacagagatccaacacagttgtctataaatagttatccaagccacgatggacttggcgatcgattctcgtgagatccctttagtatctggagaagcgagggatttttccagggtgtaattgtatagtatttttagataattcggagaagcctaaacctgggataatcttcgagtttattccagctgcacatctggttacttgaaacacgtccatcagccgcttcgtacccttgcatacatcaaaccctgcttccaaaagggaactaagccaatcaatcatacccagagacatagtaaacaagattaaggctccgtagaatcccatgacctctgtatatatgtgagctgtggctggagagctacctatattatgtacaagtcgcgtcatttgattccacctcgcttttactcccatagatgatacaatatgctctccgcacggaatactgatgtcactatagtaaagtcagaaccgaaaatcacgcgtaagtcctcaaattacttaggtaggggtggtaagtagatgttgcaaactactatgtcatactcgagtcggcgaatagtacatcggcggactttgggcatagactatctcgacggtggccacggtcatcctactctatgtcgcttttctctttatttcttagacatggatatcatttacgagtcctatgagtcttcgaaatatactatcacgatttccgtatgggatatctaacgagcgaggttaacctgtcttcgatgcacatgccaatcgagattcgcacttagtagatgacagataggtgcagaattgttcatcgaacgtcatatttcgcccaatgtgcctccactgaggctagtgatagataaaaattggttgccagacttgatttgaatgctatgcggataaccgataacagcggtgcgataaggcctcaggcgccaactggggtctgccaagcacggatgaactgccaccgccttccgaatttttttgagtcccgatatgattgcgaaaaaattggagatgttcatcgagtctacaacttgctaaaatgggctcctctactactcaactcacctctaaggtgacctcgggctccccttaccaacttgacaagccccaggttagtaccaataactccccagagtcaatttcgcaaagtacttatcttatttcaattaggtcctcaaagcttccaccgcgctgttgaagcacatcaagtcttctcaacaggaacaggagaagaccaacaccaagaagaccctgattggcgacgatgactccgatggcgaggacagtgcgaccaagaacgaagccatctggctcgttctcaccaccaagcagcatgtagtggataagaaccgactgaagcccggaaaaatcagcatccctcactctctcaacacatctccctcgctcagtatctgtttgatcactgccgacccccagcgtggcgttaaggatattattgcggacccatccttcccccagggcctttcctcccgcatcgagaaggttattggtttctctaaattgaaggcccgctaccagagctttgagagccgtcgccaattgttcgccgagcacgatgtcttcctggctgatgaccgtatcgctatgcgcctggtgcagaccctcggaaagatcttctacaagtctagcaagcgcccaattcccattcgtatcgctgagatcgagaaggcggatggcaagcgggtcaagaaggacactaagaagaacaactcttcctccaaggaagagaagaacgcctctttcgcctctcctcttattgtcgccaaggagatcgagcgtaccctgagctgtgccgccgtgcagctcgcaccatccaccaccgccgccgttcgggtcggttcgtccaagttcacagccgagcaactatctgagaatattgccgctgttgtcaacggtctaaccgataagtttgtcgcaaagggctggagaaacatcaaggctcttcacatcaagggtgccaacactatggccctgcctatctggctcgctgatgagttgtgggtggaggatgccaacgtgctggaagctgcgcctgagactgaagctatcaaggactccaagaagcgcaagtccgctggagatggcaagctgctcgaggagaagaagaccaagaagaccaagcccgcagaggatgaggaggaggctgcatccgtggctgcgcggaaagagaaactccagcaactcaaggctcaggcgctcgaggacggtgacataagcaagcccgtcgcaacgaaggttggcggcaagaagaagaagaagtcaacttcatgatggttatagctcttaatgttctctgcatgtaaaggtatttctggcgtacaaaatatcacgtatctattgttccaacaatttatcttataccagtaattgaaatcaatctaacagtaggaatactaaagcatcgacatacaacataacagaggaatagatctagccttttttcatcgccgtcgcatgcgtcatttcgaagaacgatcgggctatatggccgccgccgcattaaccgagtccgacctcggggagccagtcttggcacgccgacgatagccacccaaattaacatttaccgcgaatcaccgagctttaatcttgctcttcttcttatgtctggaagatcaacgcaaaatcattctaccaagttgtcattatgattccaatcgctaggcactctgtcctgcgggctgcccgcgctcagctccaacccacccggaagcttagcctgcccacttcttcggcgcttgcccgcctcctctcgaccctcgccgtcctcgagcagcgcaatggaaagctggaatcttcgtctttttccgcagtcgcggctgcactgaagctcggtggctcagtaacgggcttcgttgctggctctggtgtgaaggccacctccgctgccgaggctgctaagatcaagggtgttgagaaggtgctggccgtggacaacgacgcatacgagaaggtaaatactctagcagcctctgaaatcaatttcggtagaaggagctttggctaacaattggatttcttgcatcatagggcctcgccgagaactatgcctctcttcttgtcgagaacatcaagaagggcgaattcacccacgtcattgcaggccactctgcctttggaaagagcgtgttgccccgcgtggctgccctcttggatgtgcagcaaatctcggacatcaccggtatcgagagcgaggacagtatgtgacaagagaaagaagtttgacatgtgatccggcaactgaccataatccagctttcgtccgccccatctacgccggtaacgcgattctgaccgtccagtcaaccgacaagatcaaggtgatcacagtgcgaggcaccgccttccaggacgtcgaggttgagggcggctccgccgaggtcgtcgacggagtggaccccaacgttcccgcgctcaccgagtgggtgtccgaggaattggccaagtcagaacgcccggagctcgccacagccacacgtgttgtgtctggaggccgtggcttgaagtccaaggaggagtttgaccgcctcatgcttccgctggcggattccctcggcgctgctgttggtgcttcgcgtgctgctgttgacagtggcttcgccgataacagtctgcaggttggccagactggtaagaacgttgctcctcagctctacctctgtgccggtatctccggtgctatccagcacttggctggtatgaaggacagcaaggtcattgctgctatcaacaaagatcccgaggctcctatcttccaggttgctgatgttggcctcgtcggtgacttgtttgacaaggtacccgagctgaccgagaagctcaagagcgcctaagttggtcgcgcgaatttctcttatgtatcacgacctatcgagtaggttggtaccttttttatctgttaaatgatcgtacagtataccatttactagaggatggaaccaagattggttggccaaatttccatcatttttgttctgattttagtgaaacaattcaatgctttaaactttacgctgaaccttgaaaagaatctagtcacaaataaatcattgtttgagtattgggtacacttgtagatacaatataagtcttgactgtaaaaggactttgcggccaaaacgggactagcgcgttctgcacgcgtcgcgcgtctatcagagggggattacatcggagaccattcaacgacatgaaatgtccgaacgcttgaatgcttccctcctcgccatcgttcctatcctcgtttgaccccgccgtttacctccactcggaaggacctggcaacacaaacccaccgtctgaatcattctccgacgatctcgaggcaattcacctgcaccgccgcgatcagacccgcaacggaatcgtgattcaacatcgagcgtggaatctatctgacgtgtttcgtagcgaagacgacatacaacccggttcgcaatctcaaacccgcattgcctggagtcgtggcactgacaaccacatagtagatacgccgacgaagaacgttacaaccccgagaccattttctcgcactcctactcgaaatctgtcttttatgccatcctcgccgccggtttcgagaatgccgttcatagcgtctccgggcgcgcttacacccacatctggcaatgcgaccaacgattcgcagaagaggaaagtcacaaattcagagggaggtgtgcagctgacagagccgaagcgccagcgcatggttggaggcttcgttgatgatgacgacgaggacgaagacgacctcgctgctttccgggacgagcagatgaagaatcaatatgacctgcccgagcactttattcaagagcctccggcggaactccctagtatactggcaccgctgccgacatctactaaattgaatgctacaattagctcttccaggataccactacacctgacaccccggcctgctccaatggctcccaagagattccagatcaagacttgtgccggcaaggcccatactgtcccgcaaaggaaggcccaggcccccgtttcgtataaacaaatgatcgccaatcggtcccagacagaaccaggaaaggcgacgaagagctattatggtatcgacatccacaagttgctagacgatgccgccaaggacaaaaagcccgtgaacaaagtccctcaaccacaagtccagcaaaccatcgaagcgaacaacatgagctcaaagcagaagaaattagactctgcaatgtggacagagaaatatcgtgctcgtaaattcaccgatctcattggggatgaacgcacacaccgagcagtcctacgctggctcaaggggtgggagtcaattgtattccctggtctagccaagtctcgaccgaagaagcctgcccgggaggatgaagaagagtacatccacaggaaggttctcttattaagtggccctccaggacttggaaaaacgacattggcccacgtatgtgctaggcaggctggctttgaagtgcttgaaatcaatgcaagtgatgatcgcagcagggatgtggttaaaggccgcattcgcgatgcattgggaaccgagaacgtcaaaggtatgaacgtggaggttggtgataaaaaggtccgccgtgccggtaaacccgtatgtgtcgtggtggacgaagtcgacggtgtcactggtggttctggaagtggtggtgagggcggcttcatgaaggccctcatcgaccttgttttgcttgaccaacggaacgcaaaatggtcttcggagggcaataatggcaagaagcgcaagggtgacaacttccgatttatgcggccgttgattttggtttgcaatgacctctatcacagcagtctccggcctcttagggcatcgtccattgcagagatgatcactgtccgtcaagcaccactggagaatgttgtccaacgagtcaagttcatcttcggacgcgagggcatcccctgcgacagtgatggggctcgaaggctctgtgaagcagcctggggtatggcgagcaaaaaaaatcgcagtggcaaaactcaggggtctgctgagggcgatattcgtagcgtgcttgttgccgcagaatttgtggcacacaagcttcgaaacgagtcgtcgccatcatcactcaggctcacgaggaactggctggagactcgagttctcaatgcatcgaccgagggtagcgcattcttcaaagagttaagtcgtgggggtgttcgtgagattgtgaaccgtgtgtttacagagggggctggcttctctgatgctcctgttggcatgagtttccaagatcgctttgatgccaccaacagccgtattcctgtcggtgtggcagatctgcgaaaacgacacgcaatcaaccgattgcgagaaatggtcgattccagcggtgatcatgaccgctgtgtatcggactgtttcgcttcgtatcccacccagcaataccaggatgataattatttttccaaacccaacgccgcccacgactggcttcatttccatgactcgatcagttcgaaagttcattcatctcaagagtgggaactgattccatacctcagccagtcggttgtcgcattccatcatctatttgctacagctactggcagaaccaccgacgacgataaaaacgatgatgacgaggaagctgaagagccccatcctttctcaggacccagagctgactttgctgctttcgaagcacaaaagcaaaaccgcgcggccatgactgcattccacgcctcgttttcggcacctatggctcgcattttccgatcgaatgaaagtataatcacagatctggtcccttacttgatccgcatgctatcaccagacgttaagccggtcatcatccgtggaaacggtgagcagagaagcaccgccaccgtccgcaaagagtccgaacgtgcgcttgtccagtctaccgtgcgtgtcatgaccgggatgggcgtgacttttgaaaaagtccgagtggaacatgagggaagccacggtggatgggcgtacagaatggaaccgtgagtgggatttcaaattttccgtgagacatacaaagctaacatatcctcaaacagaccaatcgactcacttgtggtcttctcaaagatcaagggtagcaccatcgaggcttcgggtggcacagcgccagtgcggtatgctgtccgccaagtgctagaccaagagtatcgcaaggcaacgacgcgcaagcagtctgatgccatgggcgcgtctagactcggcaccaggggtcccaggaactccgctgagacggccgcagccaaagcaatcagagaagcagccgtgaaacgggatttctttggtcggctggttgagcagcctgcgccacagcctaatgatctagacgacagctgggctgatgagtcgtccaaggctgggcggaaagtctgggttaccttccacgaaggcttctcgaacgcggtccgcaaacccatatctatggcagagctgatggctgggttgtaatatacatatgcattgagttccgagttgccttctttgagcgtttgtcatcgtatgctggagtttttcccatacatttgttgcctaccttccataatgattactgtttttacgagttattgaataccaagcactaccacattgcccgataaatatttgaattgctttacttgaatgagaacataatttgagagaaagaacttttaacatagagatattcctctatttcaacaagacatttgaacaccaagcaaaccagccaaacagcccagattatgatcgttgaacatcaccataaggacagacaaatcaaaagacaaatcaaaagacaaatgcaaatcacaaattattaaacatagtatgtggtatccaaatcattccatcgtgaggcgaaggggcgaacacgtgcacccatgaatcgacgcagtatagcatcgaaaaaatccaacaaaccaagcaccaaaacagacaacgggaaagaagaaaagagcccggaagcatctactcgaggtatagcgagtggaccgagcgggtgtgatcataatcggcgcagaagtagatgcatccatccactggttcgaaaccacttagcgcaggctgaggtagctggcaagcgcctcgttgtgtatcttcttcttctcaacctctatggcattattgttgggtacagagctctgggacttcgagccgagcgagtaccacttgtggctcttggttgatgcgtctgatgcattgagggttgtcgctgtggagacggtcgagtgggttgaggctgcgctcgatgtagtcttgcaagacgctttggaggatttggtgaacattttgtgtgtggttttgggggattttggaggattgcttgagaatttcttgacagcgaaggtaagacgtaaacgaaaagtaaacgagtatgagttggttcggtgtttatagttagcgagcaatgtgtgatgatgatgctgattttcagacctcaaggcttaatgctttgcaatggattggattgggaagtttctttttacggagatatcattgagtctttatatagagcttgggtgattcatttactccgtgtcaggctgccattccgagaagaaagaaaatctcaaaacgctgacgccccaccacctcagtcatagtatgaatacatcgagtctagaagcttttgcactgtcaaaggctggtaggacaacctaagaaagacgtcagtagtcacagccgcctcacgtgtggagccgctaatgatcggagtaagagtcggagttcgatttttactggcgagcggactacacgagggtaagactggtgtggaaaaccaaaatattggatgaataagtcggtcagaattatccaatgggatttctgagcgtgaaggccaagaatatctgataaatgaagctgcttgttctctggggcatgtgtatctatcctctagacccaaacgacgacaccgcacagtgcggagtcctaattcggtaattaattcgcacaccttttgatatgtaactcgtgaaggcttccaattttagaaggatcttgcgaaagggcgcagtcaattttcagtgattgtgcggctttgcatcttactagtatccacgtgttagaccgagctagcgcagctaaccatattcctatttcggagttgaggtctggatcttatccgaaggaatcttagataattctagacaatctaactaggcccacagggttgcatgttatttcagttatactactcggtacatagaaggcactccataatgtgcaagggtagctttccgctgaataacggcctgttttagaccctttagtgactataaattgcatagatgaatacaacataatatgtttgagaatgaatgcctagctgccaaggcgttacgatatagttacgaagtggcttaggatgactcaaagagcggggttgtttacggcttcgtaactttaaaaggatgaggcctttgaagatttgaaatcagagtacaaaggatataatgggatgattcggacgattacaaccgcgggcattaggagttagcacgatacagggatgtgctggttttaggtagtccgatgtagtccgaacatgtagatctttattccgatgctaaatttttagctcacccaatgtcctccgcggccgtcagctgagcaaatgttattaatccgagttccgagagctcagcgaacgtcagacatcagcgaatatcgggattcttttttaatatagtataacagcttctgacctaatgactaattattacataaagataatactgtaaataatgatcacggggtctctatgaacgtctattataagctatgaagacatcctagtgtgaagagagatctcgacattcgctaagacccctctgactagatagatggtcgaaaagcggattaacacggattaatatattttccttcacgctaaattagcggtcccatttcaacattcgatcagctgtaagccccttccaaaggtttgatttgaaatggaattcgatagagttagtctgatcgatgaggcttccaaccttataatttgatcagagccgggaaatttagagcgttagagatctttctgccatccgatctaattaatatactctcgcaataccgcgatttccgttagctatgagctcggaatcgcttcatttttgatatctttatatttcccttcattatcctcttagtatttataccaattgctcccgaattgatcccggttatgggtgagtaataaaagacttaaccctaaaccgaaataataattatagactgtgtcagcgtgtcttcctctgatgggagctgtagctggaatgaagtgccaatatacgattggatatgtcttgaacatattgataggatttttttgaatagacagataggtattaatgacattccaacgttccaagattgaaactcaatgtaagagattaaccatacggctttaggtcggtccatgtcgcggtgtttccgatccttcttctcagagcggttcttttcgcattcctttatgaactaaccgggatatccctccttggatatttctccttggcgttcattcttttgtgtaagatgtttgggcgcacggatacctataaccatggctacaagctgtgagtcgtcctagataatctttctgatcctgtggcgaaactttggatggtctgctatagcccgaaaaacttggatgttcaacgaattggccgaaagaaacacgcgtaacacgcgtaaggaggagaatggtgaaatcttgctaagggattggcacgttaagcgcaaatatttgacatctttgtttaacagaaaggacccaatggatgaaattatattagggggaaacgcagaaaccacgggcattgtgttactattccggacgaggggactggtgactcggaagtatgtaggtatatcagggttgaaaggtgcgaagttacaaagatgtcaaaatggtgaaaacttcaaagccaagtggcccaggcccaggatcaatttcctgatttgaactgatttgaacatgcaactagttaactacctaggtaggatgaagataactaaattagtcatcattagtcatcacctgggcaggtgacctcgggatagagacacccggacgttcgacttggcaacatcacaccggttctcgtcggttaacgcgaaggatttcaactgcctcgcaatgacgtcgaacctttggaccatttgtcagcttcaggttccacagtgccgtatgtacaacgtacgttgtaggacaatgaataatcgacattgtggggtggtgagggggatggaagcttgatttaagagtcccagtcctgatctgattccttttcctttacttctttatttcccaccttacaatccaaataaatacctcaccaaaaccaacaatgtcactcaagcctatcaccgtctacgggcatgccacgggccccaatccctggaaagtgatcatgatcctggaagagctggatatcccctacatccacaagttcataaacttcgcagatatgaagaaagagccattcgagtccatcaatcccaacggacgcgtccccgcgattgaagaccccaatacagacaccaccctttgggaatccggcgcgattctcgaatacttggttgacacatacgacaagcaaaacaccatcagctttgccaccggctccaaggactactacctcgccaagcaatggcttcacttccaggtgtccggtcaaggcccatacttcggccaggctgtttggtttagccgctaccacccagagaaggtgcaaagcgcaatcgaccgctatgtcagcgaaatccgccgtgtttctggcgtgctcaaccgggccctccaggggaagcagtatctcgtcggtgacaagttctcatatgtcgatgctgcttttgttccttggtatcagattactggccggtttgggattgatatggggaaggagttccccaatgtcgctgcttggttgaaactggtgcaggaacgtcctgctattgctaaaacggttcaggaccgggccgaggcctccgcgcagcagtagacgaaatcaacatgaggaggatatttgagagtggatagaaagaaatgaaatagaaattcacaggaatgcgtcggcgctcatgcggcctctgtccttgacaacgtgagactttaataatctggtccgaaatgatagcgttacgtgtaggaacataccattctctgcgctagtacgtccccagatagcctgccatgtcgtgtgtcgcgcgcgaaaagagggcgctgagagatgagaacaaaacatgctaagatttgtgccttctctcgggatatttcaagatccccacggcccctcgatttgccaattctacagtgctggataaattcagattcttgaacgaccactcgaagactcccgattgttgactgatagctcggcagctacatccgagccggataatcaatactggccatattttggaagcaaagagcagatcccaggatggctacgtgataatgatatattttggaagtccacctgatgcccacatattcttacaaacgatccttgcgtatatggcgctgtttacacatggaaacaatgaatatatggacccatcttctgggctcggtggcctttattgctgtaagtttcactccgaatcattccgtttcgattctgaaagacctgaatttcacccacggcgatatatttgcttttggatcattcctgacctcggcaacctgttttgattccacacgctaaagcctaagaagccactcttacaatatccaccatctctggggcaaaatgctgttgctttggtggctgcagatgactaccttcggctgcacaaaatctgccaagtcacttcgcagcgcacttctattgactactagccggtacctgaatcaaataattcactaaaaggcgctagcatagtatggtctgggggttcgagattttaagcttagcctagatatacagagagttagagaataaaacaggctttttgctcagttaacggctatacactgaaaataaaaggaatttccctaatataatcactgtagaatgcagaaatttgagagacatctaagaggtcacagacaatacagccatatgtcttttccttcaaatattgccttgtttgatgactcgcagaggccgtgaaaagaggataccagtcataccattaatattgcggtcaaaatagacctcgggagtgactgattcttccaaggtacccagggtacttcttctccatctcaaccatggaacgtacaatccgtctccaaccacggctcacgacactgaccacattatattgatctataaggaacaacgcttcttagacgtcagatggtatggtcattgaaagaaatgtccacctcaagcagcagcttggatacttgctgctgggaaagcgaccttggcccatattgatgcagccatcgaacaacagcccgtgatagtatataactatgtcatgtgaaggcatgctagttctacaaaacgccattactctccgtttacaatctaccagcagaaggcttcacttgcaaaagaaaaatgagcacaactccttctgctgcggggaggcctcagtggtgttgcataatccttcctttttactgttactgttacactcgcttcttttatctcacaggcgaaatacattaggtaagatcggcgcagaatggctcatgtcaatttcttcggtctttgctaggatattcactcttctgcacatctccgctgtctgaatgttcggtaattcccgagttttacttgcatacgtttgattgtttgccaatcccttcatctatcacagacaactccaatctattatttcatatcatattaattgcagattagagattgaagaccctgagatagccgtttgagccatttcttcagcgccggtggtctccggtggccctggcatgttagcgccgaccccgcaatttcgttcacgaatcatactttgtaggagatcaccgtgttcttatctcctgacaacctcttgcatagatcttcttttttggctgtaacatcggctggcttcatggcaacgggactcgcagcaagtggaaaccgccggcactcgagactatataatgtagttgggttttcgctgaccttcataaacaaacaccccgcgacccactttggtctgtgacccctttgaagttttccaacaatggtgtctctattcaggattgctttcgtcaccttcggggtgattcatggcgcaaatgcgtggggcgtactaggccacgcgactgttgcctatgtggcacaacattacatttcttctgaagccgcatcatggtaagtcctccgaaagagcttccagataaagacagtatccaatgctaatctatttgaagggcacaagaaattctcaatgatacttccagctcatacctagcaaacattgcttcctgggcagatcaataccgcctcaaagatgacggcaaatggtcagcccctttgcactacattgatgccatggatgacccgccaacaagctgcaacgtggactacgagcgcgactgtggagctgaaggctgctcgatctctgccattgccaactatacccagcgtgcaggggatagcaaactcactactgccaataccgccgaagctctcagattcctcgtgcacttccttggcgatctcacgcagccattgcacgacgagaactacgaggttggcggaaatggcatcagtgtcactttcaacaactactctgacaaccttcattcggactgggatacatacatgcctgtacagctgattggcggtagttcgctcgccgatgcgcagggatgggccgacagcctggtcgatgaaatcacttccggcacctacaaaaagcaagcagcgagctggatcaaaggcgataccatcagtgatactatcaccactgccactcgatgggcatcggatgccaattcttttgtctgtactgttgtcatgccggatggagccgctgccttgcagactggcgatctatacccgacatactacaactccgccatcggcacgatcgagctccagattgctaaaggcggctaccgactagccaattggctcaacatgatttacaagcagaatgttactgctaagaatacgccagggaaattcggcaaagggcaccgacagcctgaatttgtccgcgagcctcaccatgagcctaataagatgagccgcgcaaatctagctagagctgctatgggaggatcttgctgcaaatcagaaggacgtgagcatagccattgatttaatggcatttgtagatgttgtggattcagctgtctgaagccagccatccttgttaggaccattgttgatataatattactagctacatagacatcatgccttttctttctcgctatccattaattttccttttatctgctataaaaacatacaacagcacgtctaaggtggttgtcgcctgcgtccacggttcgggcacgggtggctcgccgctctatctagggcaattagggcggattatccccgttgcgatgtttgagtcatcaggcttgtctgtcatctttcttttcagcttggaatgagcctattttggagattcattatgatgagaacaaaaataggccaagtttcaatgaagtacagcaagttacatttacctattctgatcaaaaaaagctgtaatatcatctttcccctctgctttccactctccagccccgcttagcaagatgtgtactaagcaagacttaggttcacggataacttgtgcgcgctattatatatactggtcttttggctgagcggaagagacgtgcgcaccggcatattctttacaccaaattctatacatttcgcttcccggtttaatattcaaaggttattagttaacgtagtccacagccgagccggctataccagccgacatcacataataagtgcgatgaattacaacatgatatctcaacaacggtggcctataatagacttttgtttcagcctaatgggtttatacgaagtccagccttttttttaagagaattctagaaatctaataattcagtgattatatttttagcttttagccctgtattttcaaacacgataagctttttactgatcttacaattatactttttcacccaaactagttagattgtgtctcactagtctataatacgctttcgttccagaccgacataaactttcaagagtaagacaattaaacagaccaatgagatatgattctacttattccgaaaggcgattgtgtgcacgcttcagacacattactgtctggtgggacataatctagacgtaaatgagcgcgaaagcagcgccgagtacagccatggctcccttggggccgctgagctgagatgatgcagcatcagtcgagggtacagcggaggcggaggcactggtggatgaagagtcggaagaggaagtggtggaggctgcgatgaaaaagttgtattagtatgattgccttgtaaaattgtgcggagatgcatcatgcctgaagaagacgaaggatcagtcgacgacgtggatgtcgaagacaccaaggatgtaagggtgggggtgacggatgtaaaagtggtcgtcgcggaagaagaagtggtggtggtggtagtggaagaagaagaagtggtagtagacgtagaagaagaagacgtggaagtagacgtagacgacgtggaagaagacgtggaagaagtagaagaagaggtggaagaagacaaggatgtagtaccatcatctgaagcgcccttcttgacagtaaaggtgtcactgacggcgagctggcccccagaatcaattatctggatctcgtagtcatctctaaggcatggcagaatggtattagtgttgttcttctctgctcacccaccctatcttctacatacccgttggaaatgctagggttaggctgggtcgtgtattcgccctcagaggtcttgacgttatccgccaatttggtctggaaggagccatccttcgatctcaggatgatgctgattaccgaagggtcactagaaccgctagtgaatttgatagttttggcagtggagaaatcccacaccgagtctgacgagggagcggtgacggtgatggccaaagccgatgagaggaggctcagagcggtgatgatgaatgagtagcgcattttgattgactggaatttctgaattgcttgatggcgagctgatgggaatgtccactatttcttaggataagactatataggaactagattgttcgaagatctatatacagaaatcagtaactttcagccgaagcccagcgcattgagaatacgagatagtaatccaaaccttgcatagaagctgaatatgatatgaacatgcgctgagcctcttgtggagacactgaaaaattcaggggtcattctggtgaccacgtatattgtagggtagcaacgaatgggcattgctaagatcatcactgcaccagcgacccgtcctgttgtgttgagggtccatccaagtaagcattgcaccttatctttccaatcaagtctccagcacgcatcgtccttgctaataaagggttaaacttaggcgaccagcatgtcagcgctaatttagcgtttgggggtgcagcagatatggagtataccgacagggctcggaaatcgaggttatcataatggagatctattttcgttgtattgtatcgtcacttacagccgagaatgaataccggtcatgactggtaatattcatcagatgagattggtaggtatgccgtcttactctgctgcgcccaatgttcaaaagcgattgtcggaattcagctccaagtacggagtttctatgttggaccttactgtgcgtagccagacgagaagcggtagagttgaggtttctaattagggcaagttgcccgaatgaggggtgggtgcctcaggccactatctccattctaaggttctatggagtagctactcaacacatctcctatgttccatggtaattcacgaggtaatatgaaagcaatagaattaattatacggaggatctagtctatagtaaaaccactgcataaaccatcaaacaacgtcaacaaacaaaatcaaaaactaattcggacaggaaacataattaaagcggtaggaatggcggtctagagatagatggaaacgaaggaggtggtcaatgcgaccgtgactatcatctcccacgacaagctgaataacgaaaccccagcgccggtggaagcctttggacttgctgcggaggttgtcgatgttcgggtgtgatctccacaaatattgctgcttcggttcaggctttcagtaggataatacacccgaggccctccatccgagctgaggtccacattgagatttccgcttgaatcggtcacatatgttttgcaagacaagagctcgctcacattctgtccggatgaaaatcctgtgccgtcggagccaagcgtgattttcgtggtagctttgcgggatggcttggctcccaggttggacacgacgctcacaacctggttaccggcaaatcccttgcgcatggccaaaatgtttgttgaattgtagatcggcaatgagaggtatgatagatagtcgacccctgacttcggggcgaccgtagacttttctccgtcaccgcttgcatatgatctaatgcgattcaacgattggactagcgaaggtagggaggtcgagtgcattgagtatttggtaagccatagggcctcccggttgacaggattgaatccacctgacaggtgctgttcctccccgtagtagactgtgttgcgtttattagtatcgttggctttcgtttctgttcgagggggcacaacatacggatggggataccgtcagcgagcatgctgattgtgagaatgttgcgagccagctaatcgggagcgacaaagtcaatgcgtgctgacaaaatacccgatgcactcgacttaccgatatgtctgaagtatacgagccaaagcgagcgacatcctgattcgatgtgaaagttcccaggggcagtacgtcctcgcactgtttcctgacgtaatctatagactgtacgattctgttcaggtctccgtcggtcgtgttgaaagcctctgtgaggatataatacctaaaagtgtcaacacgccctccgttcattttgatgaggtactcacaacggataattcaaaagtccgggtagaccgggctgtagagaacagtaaccggatgcgtctcttgtggcgccttcgcccatagtaaaaacaccggccgacttggtgaaattggagaagaagacggggggaatgttcaagacactgtcgattcgcaggccatcaactacaaagaataactgttattaaattccttggagacataggagacacatagacatactggagtagttggaaaccaactgcgaaatccaggtgcccagcatctgctggacttcctgatcctcgtttcgcagatctggaagcgatatggtcgtgtctcccatccagcactgataaaggcttagcaatgctctcacaaatgctatgacagacttacatccagaacacaggtactgtttacggggtcctcagaaagtagcttgtagtcgtggaaatacttctgatcattgaatggattgaacttgctgtagtcgatagtggaggcatttccagcccaggccatgtcaccaacgacaatatccagcatcaagtactattttatatgtcagttttgggagtagacatggcagccggcgactcaccatgccacgcgcgtgcaatgccgcggataacgcttcgaggtcatcggaagtgccaaaatgggagttgatggaataaaggtcgtttggccaatacccatggtatgctatcatccatcaatcgttagttctctatatccgttcacagtcaatatgaccatacctgagagatccgccgtgcgagttgactcctggctctgcactggagagatccagaccgcatcgaacccgagttcctgaatgtaatccagcttattgatgatgccctgcaagctccctccacaatactctcccagagctgcaacacaaggagcgatggttgaattatcggatcgagcgaagcgatcggtgaccacttggtaaacggaccgaccgagccattggtctcgggatgccgcatgtactgtcccaatggcggcgaccaccaaaaccttccaccaccacattgtcagtggcgcttgcatgacaggtcaaaggtgaatcaaatgacggatggattcagagacaatgaaaaggctacatatgtacttaaatttattgacaatgccatataggctgaaaattatttacggtgaggtacgtgtatcttgtaccgtatgtgtaatacatatcttaacgatctgtattatgtcggcccgatcggcaagctttgctgatccttgaaaatcccgcgaactcatcgggcacatattgcttccgagggacggagtggccgtgaaggaaagccaaaaaaaaaagcaataatacgagacaacagcaataagccaccttatcgtcatatccaccctttcttataggtcagtcctgtatcaggtatgacgtgttctatcatatattaggcgggatacccgatctggcataatatacactttatgatcttcggcacgactggtctagaaaactcgtatagctttgcagcaaacacgtatatcattctccacataagcaagctatcgagcaaagacccacttcgtatattgggttcagggctgtggaccactccgaagatcctataccgatgcatgtcagcttgcgatctattgtccagagttatgaccgctcaatcgcttagcgtgagtatggatatgctttactgtggattgaggctgtatagcaaggctggatcatgtctccagtggttcgcctaattcctgcgtctatgctgattagtattgaatcaattattgcattggcctggacatctccggagttttcattatctttcacatgcttctcttgcgcatatgtgccctatgaatcgttcactatctttccttctatgagttatcgcattcttcttggtatgcaccctgtggttttttgactgcagtcgaggctcgaacagcgtgttctgtgaatatcaccatagtggcattcactgtgcggaatggagttgctcacttccatcactcaataccttgccattgttgcaatatatatacgcattgtacaatcattgccctatcttccagaggaagcagactggaatctcaatcaaaatcagacagcgacacatcccctcgactactcgggtcggtgggatgaccacacatacaacccctcgccagagaattggcgattcccgttttacacgatatttctcgacagatttgtaaatggcgatccgagtaacgataatgcaaatggcacacagtgggaacacatcttgacctctaacgagttccgccatggcggcgacgttcttgggttggttgatacgtttgattatcttcaggggatggggatcaaggtgcgcttttttgcttccggaagattggacgtggaaaatatattaaccatatccagggcgtctacctcgctggaacaccgtatatcaactttccttgggccgcggatggatactccccgctggacctgaccctgctggaccaccactttggtacaattgaagattggcgcacaatgatatctgaggcacatcgacggggaatttatgttctttttgataatacctttgcaacgtatgtgggatctatctgcgcaacctccgatgtcgtctgctgattttgcacagaatgggcgatcttatcggcttccagggtttcttgaacaagtccgcgccgatcaatcccaacgagtatgactctgtatggaagtatgaccgtcgatactgggactttcagcctggaaatgaagttgagagtgaatgtccctgggagtatcctcggttctggaatgacgacgggaccggtttgaccaccacaacccttggtccttcatgtcgggatagtgaatttgatcaggtaacattccctttctttcgacattgaacatgactgacccctacagtatggagaagttgccgcctttggtaactacaccgaatgggaaggacaaatctccaagttcgcatttgttcaggatcgtctacgcggatggcggccggacgtgctagccaagatcaaacacttttcttgtctgaccatcaccatgcttgatatcgacggatttcgcgttgacaaagctctacaagttacccttgactctcttggagaatggtccgagtatatgcgagattgcgccaagcaggtgggaaaggacaatttctacatccccggagagattgtgggaggaaactcttatggctcgctttatatcggtcgcggtcaccagacaaatcaaaccatctccaatctgacggaagcttttatgatgacgaacaagacaaataagtcagatgaggatctcttcttgagacccgcggagaggtccgcattggatggggcggcgttccactacacgttatatcgtggtctgagccggtttctagggttagtttcttcctttcaccactttcagtttactcaagctaacatcgtcccgttcagtctggacggcaccttcactgccgaaggtgacccgcccgtcaactttgtggatacctggaatggtcttgtggagaccaacgatatggtcaacacgaacaccggtaagttcgatcctcgtcacctgtttggtgtcacgaatcaggatgtcttcaggtggccagggatcaaaaacgggacccacaagcagaatttgggtctgtacatcgcttcgttgctcatgccgggaatccccatcctctcctggggcgaggaacaggatttctacgtcctggaaaaccaggctgacaactatgtcttcggtcgtggacccatgtcatctgctcaggcatggcagctacacggatgctacaaactgggatcatcgaaatacgttgatttcccgctcgaccgctccctgaccggatgtaaagatgattccgtcagtctcgatcaccgcgatccttcacacccagtacgaggcctaatcaagatgatgtttgagatgcgtcaaaactatcccactctgaatgatggctggtaccttcagcaattgtccaaccagacgttcgacatctaccttccaggtagtggtggaacaccgacagagacggggatgtggagtgtcatgagatcgcgctttgcggatgcgcagaatttcgatggccaaggccaggggaaccagagcgtttggctggtgtattctaatgacaacaaaacagtcgaacacaaattcaattgcagcagtaaggatgctttgatctcgccattccccgcgggaacaagggtcaaaaatcttttcccgccgtttgaggaattgacgctggccaacagttcgactaggcttgggtatgattgctattctgagattgattgctgttactgacaatgagcagattcgaagggtctaaagttcccaacgggtgttatcccaaccttactatgccggcctggggtttcaaagcctttgtcccgaaggataacttcgtgcagccttccccgtatgtaacccgcttctccccagggcatgacgctcggcttgtgccccagggaaaaagtggggatacagttcgaattggcttcgaattctctcaggagatggactgcgtggatatcacgaactcgctaacgataacgtcaaaagcgcttaacgacgagagcccacaacttgacactacctcggtctcttgtaaaccaattacagagactgatgttgtgacatggcccggggcactcactagcgttttcagctacgaagtagatttgggcaatgtcttcccaggggttcacagagtcacacttaccaatgtgactacagcagatggaaatcaatccacaggtgtgagtaaattcctcgctatacagattaagaaagtctcaatactaattgaggcagtccgttgaccactttcttttccgtatcggagagataaacaatccgatggtctggccacagttggccaactacagtagaacgctattgttcgacaacccgtcgtctgaaactgaacccttatcagtaatgccacaggcccctggtgcagacatgtggcgttattcgctggattttggagctacattcagtaactggatgacatacaccggcttcaacacttcgatccccggcaaaaactggtccggcactgcgaagcaggcctgggaaggagaacacatccttgcccaatactggagcaagttgaccggaagtagcgctcactggcaacatggagacacgcaatgggcatacaagcccccacgtcgcttcccaaacctcttcatcgaaggcgagttcaaccagttcggatatgacgctggctattccaacaaaatggctctcagcaacgtaagtggccagtgggaaatccacttcatggctgaatggcccgtgcaagttgcattcaacgcctgggggttgaacgaagacggcttgcccgatcagacacaggtatttggggatattgacggagacaatgtcctggatcaggtccctccagtcacgcttctgagcaatgtgttcaacgttacaattccacccccttcgccctatctttccttcaagctatcggtgggtgacggcgatcttagggtctacgctacgcccactggatccaggtgggttcagctggccatctttattgtgctagcaattgtgcctgtcgctaccgctcttggcgcggtttttgtttatctgaaggccttttaccaggtcaaattcaatcaagtcggtgtgaccgagaaaagatcaagtttcgctccgctggtgagtccactggtgagcgtctttcaaaaggtggctcatcgatctacgaaccccggacttgctctcaccaatgtgggcccgttcccatctgaaaatggaggcgtcgttggtgccacggtaaacacctgccgacgaaccgtgctcattgcaacaatggaatacgatattgaagattggggcattaagatcaagatcggtgggctcggtgtgatggcccagctgatgggaaaacatctagcccaccaggacctcatctgggtggtcccttgtgttggaggagttgactaccctagggacgaccctcgtgagccgatggtaatcaccgttcttgggaataactaccaagtggatgtccagtatcatcagctgcaaaacatcacgtacgtcttgttagatgcgcctgtgttccgagctcaatccaaatcagagccgtaccctgcccgcatggatgatctggattcggctatattctattctgcttggaatcaatgtattgccgaggccatcaagagatttccggctatcgacctctatcatatcaatgattaccatggcgctgctgcccctctctatcttctacctcacacaatcccatgctgcctatctctgcataacgccgaatttcaaggactctggccgatgcaaactccacaacaaaatcaagaggtttgcagtgtctataaccttgaccatgcattggtaaagaagtatgtccaattcggagaggtgttcaaccttctacatggagcttccaactatctgaaaatccaccagaacggattcggcgctgtcggtgtctccaagaaatatggcaagcgatcgtacgccagatatcctattttctggggtctcaagaacattggagcgcttccaaaccccgatccatctgacatcgccgagtgggatcaaaacgcaaacaacaaccccgaagacgttattattgacgctgagtttgaagccagtcgtgccgcactcaagaaacaagcacaagaatgggcagggcttaaagttgacccagaggccgagctgtttgtgtttgtcggtcgttggtctatgcaaaagggcgttgatctgattgcagacatcttcccctccattttagacgcccacccaaaggttcagttgatgtgcattggcccagtaattgatctctatggaagatttgctgcgttgaaattgaatcgactcatagatctctatcctgggcgagtcttttccagaccagagttcactgcactaccgcccttcattttcagtggtgcagaatttgccttgattccttcgcgcgatgaaccgttcggtttggtggccgtggaattcggacggaaaggagctttgggcgtgggatcacggtaagacttacctggcttgaatctaccaacagtgctaacttatgttccttttttagtgttggtggccttgggcagatgccaggatggtggttcacaatgtgagtttccttctctctctctctctctctctctctctctatgttcaaactaacacattctagcgagtctatgacaaccaaacatcttattcagcagttcaagatggccatcaatgacgctctgaaatcgtcgcaggagacacgagctctcatgcgtgcacgatccggcaagcagcgtttccccgtagcacagtgggttgaggatctggaaacgctacaaaccacctcaatcaaaaagcacgccaagtactctaagcgccacgatcgtggttcatggagattttcccgtggcagcactcttgtcccagaaagcatccctaaagtctcgcccagctcagacaacagccgcgaacagagcagatcacgcggctccaccgtatctgtcccaccgagtaggccgattacgactgagatgagattgtctggacctcgaccaggccttgactatgttccctcgccgacaactccgtctttcagtcttaacatgtccgacaacgagcccgattctgacgccgacccaagacgcagacctttgtcctccaaccatctcacagactcgcgagtcgtttacacctcggtaagcgatggagaagatctcgagcctatttccggggacggcaatgatcgtctatcgccatttaggacacctaccgtttattttgctcgatccggtgccagcacaccagctctcagtgcaggatcagaagacggtgtgctgggccgaagagatgcaagggcgtctatgatgagtctggtcagcgtggatgatataacaaaggagaaacaacactacaatctccagaaagttgatccatttttcacagatgtgaataacgagtacgcggagaagtttgagaagaagcttgcaggcctgaatggcaagaattccgaagaccagctctgcatcgaggagtttctcgagaagagtgaaaaagactggttcaatcgataccgcgacgtcaagctgggcaagtcccccttgccatctcctgctccctctgtctttcgtttcaaggttcatgaaatcggtcgctcagagaccccgccaattaatggtccaggtgcaaggcccaatactgggcaattccttctcccaaatgactatgttccccccacgggtgtgaagcgtttcatgttgatgaagctgggtgattggcctgtgtactccatcttcctcgctattgtaagttgaaaccctaccaaaaaccttcatcatagccattgacagtattattcagggccaaattctcgccttgaattcgtaccagatcacactcctgaacggtgagattggagagacggccgagaagctatacattctggcatccatctatcttgcctcttctatcatatggtggatggtcttccgtctagtcccctcagtctacgtgttgacgattcctttccttgtacgttcaagttcctctatccagcttacggggttgcaagctgactagccgcagatatacgggctcgcctttctatttgtcggtcttaccggtcacatccaaaacggcacaagtcaaacatggctacaaaatgtgggagtcggcttgtattcgtttgcgtcttcgagtggttcgattttcttcgccctcaactttggagacgaaggtatgcaccaactcttctaggaaatatggaacttatctgactttcttgttcaggtggagcgcctctgaggtcttggatttacagggccactgtcatccagggcacccagcaattgttcatcagtttcctttggtactggggtagctggatggcaactctcaatcaaaaaggtagtgagcaattcagccttgccatgaccgatccaggtgctttgctcggaatcggactcggactcgcctgttttatgtggctgttgggagccctgatcttctttggacttcctacatattaccgacaagcaccaggtcaagtgccgacattctacctatcgctcttccgtcgtcgcattattcttgtatgtctcttccagtcccccctcaagctaatcttgattctgacactgtattttgcagtggtttttctacatggtgtttatatcgaactactggctgtcggcaccgtacggacggaactggctctatctctggtccagcaagcatgcacaggtgtggcatatcgtgctccttgttctcctctttttcatctttgtctgggcggcagctctctgggtctttcacgtcttttccaagagacacgcctggtttatcccgatctttgctgtcggtcttggtgctcctcgatgggcccagatcctgtgggcgacctccaacatagccacatacatcccctgggccggtggtcccgtagccggagctatccttggtagagcgctatggctctggctaggagttttggattcccttcagggtgtcggtaagttccttctcgcggcgaataaaacgtaacaaaaactgacttacgccaatacagggtttggaatgatcctcctcgtcacaatgactcgattccatgtcaccttcacacttctagccgcgcaggtggtcggttccgttgcgactatcctcgcccgcgcgacagcaccggataagttaggccctggtgatgtcttccctgatttctcggctggggtcgcagccggcttggaaaaggcagacttctgggtgtgcctgctcttcatgctgtccatcaatgtgctctgcatcttcttctatcgcaaggaacaacttgcgaaaccttgactggcgttttcttttctttttttctgctttgcatccactcaacattgtgaggcgtagatattgtgatcagaggattaattatactataatcggttgcatttgctagggcgcgatagaccttgtaaaggtcggcccttgttttggatatgtacataatacaagtcaggtatccaaatttaatgttcatattcatattcatttggtgcttaataggcatcgatgcttctagtcctaaattaaattcattaatcaataccttgaagtggtttcccttggttggacttcccttattctgtcaagcgggcgtgtcccgatcgcgcgaaaatcaacaatatggaacggtacagcctacgccggtttaggactagtccggggaaatgacttttccgagccggtactccgtatatattagtcatctgttattcccgcttctttcattccgatcgcttattccaatggtccttcttatgggccctatgcaaataatattacataagattcaataagtaactaggatagtcatgcaaagtttaggctttaggcccatttgcccactttaatgggccgagtcgactttgggtctgcgggagacctttgattagtgctcttgccaatatccgggcccatacccatttgccttgcgataaattatgacataacagtcatgtccacaatagttggcaagcgcaagcgtgcaaggaaggcatgcataccttgccaccagcgcaagcgaaaatgcaatggggagtacccttgcggcacgtgcaccacctacgaatataactgcagatacgccgacgatgacaccaccaacactgcgggtaaaaacgaccatactccactcctggacaagcgcatcattaatgacggcgggagtactatggcgatcggtgtcaccgccgaatcgcgcagcccggacagccaatcccatggagcgagagctgccggagctgacagttcatcgtcaaagagttctgccgtcggggccggcatcttcgacgagcagaagtccagatacactggagcatcggcagccatggccttcccgcacatcctgggggtggcttttggcgccgacagccctccaaagatcaactcgttcgcgtacaactttgggatccgccccgaagaggcttccaacgcgtatggcttcctagggaaactaatttcagaagaaaatctcgccttctactcaaatgtgtacttctctgcaatgggccctatcggcgactgcttggacccaagaatttatgcccagcgatgtcgcgattattatcgtagctccggcagcaacgcggtcgccttcagcgccgtagccgctggtgtcgctgcttgcgggtcgttcctctccacaaccaggtacccgggggagtctgatctactgcagtacgctaaagctattctcgatgatcctggatctatacgcatggtaagcatcgaccatatcgtcgcgtggagcatgcggttattttatctaagggccacagcccgccctagtaatgcttgggtcgcatcgtgcactcttatgcacctttgtgaagtggttgggttacacaaagaagagaatattaaaaggatggcgtctgctgccggtgctgctgttgttgggcatgatgcggaccggctaaggcgaattttctggatctcatgggccgcacatcacatgctgtcgtatgagtacgatcgttcggctgtaacatttgggaccgtgacttgtcagcccatcatctccattccggggtccgttgccgaccagttcgtgcaaatagtccagatcatcccatcgcctaactcgccgttccagctcgaaagtcagcctccaactccgagggaggagttgttccagcgtctcacggcattgagtaaactctgtttcactcatccgttcctagtggtgacgaaggcggaccttgcgttttgtttctatcgacgcatttatcagctcaagacaggcgtgacagacgagataattcaacacgtcattgatagcggtaacgacgcagtgagagcggctgagaagctagccaaccagggtcgtctgttgtggaacgtcataggcagcgtcttccagtatgtctgtgtcttgttggccatcgacacgccggcctcctccgctcacatccctgccgcgttcaaagggttggagaatcttgccagggcaacagacacaggatcgacccgtcaggcattgtcaatagcacggcatcttctcagtctcaatatagcaaagaagcgaaaagagcttctgcagcttgaagctgtggagtcgggctacgaacccttccaggcgcagccggaacccgatgccaacgctgcttttacggacattggctggggtatggactgggatcagcttctcatcgagccatatctatctattttcggacccgacatccagctgtagtagcgcaaaggggcattgtgaaataatccactcagcggcgattcaactcattaaaccatggcgtggcattctataatggtctaggatgaaattcagtgttacatttatgtaaaattgccattgaagacatctaaacaaattcttcctgcgtttcgctcttttcctgctccgccctttctggcgtcatggactaatgccgctccacaaaacagaaaagcagagccacagctaaacccaggccagagagaccgacaccgatatacaatacgccgcgatatctttataggacatccttcccattattattgacctgcccctcgaccgtgccggcaaactgtcgactttgtgctttggatcatatgccaacgagcggctacggagtatatttattcgattcgtgctccgtgaggctagaggctgagcccctgcacaaatcaataaagctcctctttctccacatcgtgatcaactggatcatctaggccgtaggtatgcacggaggtctgttagtcgggagtggactcaacgccgcttcaatgttggtgcagcggagcgggtctaactatggcccccaatgtgcggctgctgcggccgagatgtgcgggatgaccatccttaaccccgacggtatctccctcattatggggcttggcattttaacaagtacctttggcgctaatcgccgcagttgccgcggctattccggagcggcccagaacttaccacagtgcagctgcgacggtgacggtcatgcgcgtgttgcgactcatagtgggttgatctggcctacgggttcgggggcgcaagtatctctgcgcgaatcaagttcgaaggtctggccacatcaatcccgatatgcgagctgcccggaggataaatagctgcgcggaattagcgtttcggaattatccaatccgatcgttgtaactaggctgagatggagagaatggcaacaaagtttggctctgcggcgatttcgagactgggcctgaagtgtataaatggacaggtattctctgctccatggaagatttgccagacacccaggagctcaaacggcaacagctacaagagctaccatacttcggacaccacttttgaccacaatcacaacaatcgatacacattgaatccccaattcaaaagaagattttcaacaagagcaaaaatgcctgagtacgccaagaaccagccagccggcttcaaaaatgccattgagagagtcgccattgtcggtgtaggtgtatccctccagcagcagccatgcacaaaaattaacaaacgtccttaggccggaggcactgttggatcccacctcgttgccgctctccttaaaaccggaaaacacacggttacggctctctcccgcagagatagtagcaacaaactccccgagggcgtcctcgtcgccccagttgactattccaacgaggccactattgtcgctgccctcaagggccaggaattcttcatcatcacagtatcccccactgcgccccgcgacacccacagcaagctcgtccgggcggccgccaaggctggtgttccctacatcatgcctaacgggtacgctggcgacattgaacacactaaactcggagaggatatcatgctcggtcccgttgctcaggctgccagggacgagattgagagcctcggtatgaagtggatcaccgtgtgctgtgggttctggtacgattacagcttagcggggggtgaggcgcgcttcgggttcgactttgacaagcggtctctgacgatctatgatgacggcaccaccaagaactcggtatcgaccttgtcgcaggttgggcgcgctgtggccaaagtgctgagtttcaaggtgcttcctgaggaccaaaacgacaagagccttactgtgtcgcgatggcttaataaacctgtgtatattaagagcttcgtgatcaaccagaccgagatgtttgagagcgtcaagcgcgtcacaggcactagtgacgctgactggactatcactcatgaggatagtaagaagcgatacgcagatggactgacaatggtcaagactggtaacatggctggctttggtaagctgctttacgcaagggcatttttcccagatgatccgggtgattgctcggccaaggcacagaatgagctgcttggtctgccggaggagagcctggatgaggctactcgagctggggttgatatggtcaaggaacttcagcttcgtgttgagcgtatggcgtcatagaaaatagcatctgcagggggataccattgcaatgcaaacttgacatgaatagaatagaaaagggacggagaatgaaaatgaccctgataaatttaggggattgttataccccctggtttaattctactttacagactccgtagtcaaaaagcccctacattttgatcataaaaaacgtgtatttcatctcatacctacatgtttgaatcccttgatgatgatggagcagtttttggagcagattttgaagtaattgttgaagtagttggtgtgataaaagtaacttgattttgttgatggtttatatacaaattgtgggtatctaccgtcctcaagttggtagggagttcaatactaagccggtgtggagggcggtatgctgaatcaggcagttggggggggggtcgaattagcaattaggggggtccctttaacagtcccctaactataaaatcaccctgaggcataaatagcaacgcagacaccttcaaccaccttctcttcttcccatcccatggcaattccgaagccaagaggtgaactcatggagcgaagatcaatatgagcttcgtcaatttgctgtacacaatctgcttattactgccgaccgatttaaagtgggacagtatccagccagcatcatctcaatttgcatatcggtgaggctatcacgattcaccgggtagcatcggcttccggggcctcttcagttaagagaatctcttgtttactttttcctcttctctatctctctgccatctcagatactcatcacatgggtttcaccaaatgatcaacccaggatgactcttccaacttcctcctacaatcctatcatctttttacggcaagtcttctggtggaggcatagacccgtacccatttgagggttcatgaagcgggtaaatgaaagaaaacccaactgtaagtgcagtgtcgtctattaccagtctcttttgactacggagttttacaatactaatgatgatactctgtatagggcagatgatctcgtggcgatacggaataagtggctcgctgcgctacataccgcaagctcttgcaggtcaagatctacggaaccaacaatgatttaaaacgatcattaaccacaattttaggtctcgagatattcatcacgagagagtctatgtgaagcttggtggcattgagatcaccaatctttcacatttgatacacttcgagccggctgaatacaaagcaattgtcgacgatgatctggtagatcccgatggtgagatacaggtcttacttgaagtcaaggctaggcatctggtatcgacttcatcaagagaagtcctgatgcaacaggggcttgaaatgctggcatgggttgctgaaactctgggcattgaagggtcagagggaccaagagtcccactgagcgactcaccaatcaagaggtaggttttatcatgatcattatactaatgcttaagaaacatcgctaatcagttgcctatagatgggtgatgttagcccaatacgcgacaagcgtatatttcatcgtcgctgatctccgtgaagggtacattgagtactcgatgacaggcgagcgctcagagaacccccttgacaagaaggcatttctcaaaatggagatattgggacctttcagcatctattctgcggaagagatgcggatgttcgggtttcttgttgtcgccctgacagttgtccagcaccgggattggaagaagggtaaggaggtttagatagtaaatgaaaagcatattcttcctcacatagactcccggactccctaatatgtgtgagtaaaccctctttggaaaaacccatcagctagcatacacgcttccgcagtcgaggcaagaaatgcatcggctcctgggagactcccgcagataaagctgtctacgtataagtgtttgagaacagaacagaataggagaagccggggaatatattgtagcgagagcaaggaagggaactaaaacgcgaagacgtagtagacaccacgagcaaacttctactttgtgtcgcgtgaagggcagttcagcccttctcaagcagcaacttgggatctccgacggaagttttggatatgagcgtgctcttcgctgaaaaggtccgggccatattcaaatgctctatgtaggctagtccgtttcaaccttgaaacaaagtatctgcgttctgatgacacttccatgacctaactcggagagcatcatctcttactatatatcatgctgttgggggttacttgcgcaccgctatgcaagcgttagaaatcccccttattgaaatattatatatacagccatgacacgccttggacaagaaaaacgaacatggggctagctgaagtagtccaaggcggtgtgcccaactatttagggcacatctggtggcagctgaagcctgagacaggtggatgccgtgcaaaagtccgcccactcttaagtcagatgccgctctagtttgtccaatagaaattcgtccatcgctgatttcactgaacttgtccacctttgcgaaaatcatcgtgagagcttgaatcgagatctctagattgctcaagtatacaaagtatggagttaatagaggaattaagaatcgaaagtccacgccaggaacaataataagcaccgaagggaccgtggacccctaagattgtgaagctccacagtgacgtcaatggattttccttgttaatttcctttttcaagggcgtcgaacgccattttaggggtttaaatagatcgaatggcgcagcatttaatttccgagccttttcctgctattatataaacacccccaggtcgtttctgccgacggttgagtggtttatttagggttgatctagaattgtcctaccttttacaatctatacaatgaggtacattctggcacatgccctcgtacaggcctcacttctctcaattacctccgcctccccggctccaactgctttcgccaatatcgctccacccgatcccgtcgttacaccttccccggtcgagcatatcccttctcccattgttggccgaaacatcttgagcgacgttgattctgatatcaaaaatgtcctttcggggcttgggtctgatctacctacatgggtcgcatctggagtgcccaacttcttccaggggttcccgactaaagacgcagttgcgagctccctcggattggacagctcagacttggcggcattaccaaccaatgtgttgaacatcgacccttatgcgaactggaccaagtcgggctggaacgttcgcttccacggaaacgtttacaagcagccgaacacatctgtctccaagttgaacgatttagccgatatcttcctcgtcaacactaaaatcgcggaccttcctcaatcccagcaggtccaggcacgaaatctgactgccgagatctttgtcgtgcagcagccacatgttgcggtgaacaagatccacatcaagcctgcggttagtcagggatccagcggacagccaggcggcggcggatcatccaacacatcaggcggtacacaagacatcaccctaccttacaacacaacagccgaaggtgacttcgacacctttgtgcagattgaaagcaatggtcttactgcgggaaatgaaacctcggcaattcagagactggacactcatgtcgagggcgcaagtatcggaaatgctaccgcctatcttgtgcctccaaccggactcaccgtgatttctgacattgacgatattctgcgtgtcactaagatttacgaaccggcgcaaggactactcaattcgttcgctcgtccattcacggcttggcagaacatgccggatatttaccgcaactggtccatcagcctccccgatacgcatttccactatcttgtaaggctcctctggctccccttttcttaataaaaatactaatagtcattccagaccaccacccccgagcaagttactagaaactacatgcagttcatctacaccacctaccccggcggctccttcgacacccgtccgctcaactttagcgacgtgtctgccactctgtcgatccgcatgttcttattgcaaaagattttcgaaaccttcccggagcgcaaattcgtcctggtcgcagacaccagcaacagcgacgtcatgcgcgattacccgaaactggccaccgaattcccgtcacaagtccaatgtattttccttcgcaacacttcggcaaccgattcgggcgacaagttcccctacgacacgtccggattcaagggcctcaagcagtcaaagtatatgttcttcgtgaacgcggatgacctcaccaacctggacatcgcaaacggacactgttacaatcagtcggttgcacagaacctgacgttcagctaccagggattgccatttggactgggggatactccaactgctgtcaacgcgtcagcgaatcaaactggagcggctagcggactcttaaccaaggagtcggctggtgcgcagggcttcatgacattgatcgcagcgatgtttacggccgcctttatggttttatagaatcttctagttacgagtgctatgaactaaatggacaatttgatacaagtctttattttttttaatcccatatatttcagcggatcgcagacagcagctagctcttccagcgtcgcaactccagccaaagaaggaatctcctcaagaacctcaagcagactccgatttcggtcgagggcagacttacaagcctcataaacgagatcatgagcgccttgtcgtcccaaatgcggtgccagtcccataatcacagcatcaccgacaatcaaccccttggtggaatacagattgcgtttcatcgagtcaaccttaaccaccaatcccccgagggcgaaattcgtctggtgcaaagcgcccaccgcagtcacgaaaacatcgggaatagccacccattccaaataccacggtccagatgcacgctcaaagataaccattctatctaatccgagagacgcattggcacgcaaccagaccacctcactggagataggattacgcttccggggcatcgtagactaagcatttctgtgaggtacgaagggctccgagacctcgtcgaactcattggaagacatgatcattacgtccaatgcaactttccccaatgtgccacccaccagagccaggaagttgaggatctccactatgttgtcccgcgcaacatgccaagtgatatcaggattctttagcccaagctcagcggcaagctgcttacgaacccggagccctgtatcatctgcaccaaatacagcgatcgtacccgctgcaccgccgaactggacaagaagacaccgctgctcgatctcctcgatgtagatagctccgctgctgtagatcgatgaatacatcatatttacttcccctgagttatcagtatcacaagcatagtcttttactaggccttctcggccaaaacgtcatcaataccatatgaaattttcagaaaaaatggggaaaacgtgattggatagccaaattctacatgacctgtttggaaggcttattcttacgttcctctctagtctctcttccagatatgatgaccgaataatataactattttaccttcctggaagatggtctctcgtacggggaattccaccgagaagggtttgtatacattttggtcttcataaacctgttactaatagtcttctaggattccccatggcggatgggtagtagaccggttagttaatgggggtatcttatatgtctcaaatgctaacttgcagtacagtaatcaccactgccgatatttccccgactttgaatgtgaaaataccgagaagcgaatttcctctagatttactgagctgccatgagcacaagggccaccagcgctcaatagtcgggttctgaaaccaggagaaatgtggcgataaacggccttcctcgatggagctctttgcgattgctgcattaacccacgaagaaatggcccgggttgataaaaggttgtataagaatctgttggacgagtgctactttactttcccggtttgtttttccttcttgggtatcgttagtcttttactgatatatcttagcatttagtatttctgatggacaaatttggcggatgccgtatgttgcaatcttattttaatggcaagcttcatgttcaattctcggagatcctagatctaggacatatgattgccgtgcctgcttaccggcaaaaatactttgatatggttgacagaaaagactttctggagaagttgaacctgcttctaaagtgggcatggcccattccacaaggaaacaccgttgcaaatgttccaaggaattatggcaattgatttgctgagatgattttgcttgatattctggtttgcttatcttcaaggttaatgttgctgctctcagaaaatgaacaccctgttaagaattcttctctcttgatggcgttcacattacacctgttaccttagtatacggaggcttatagcctccatgggtgacttatttactatcggctgatactactttttcgctttctctctgccttcaattgatatacatattactcatggataatagccgcagatccactaagccatggaatggtatttagctttgccaattaattgatactaagatgtagatacaaggccgaagcaaaaacaagatggcccggaaatggtatctgggtgcgggccatcatcgcaatgagcttcccgatcatgtttcacatgcaatgatatgaagctaatctctctctttatactgccgagcagcataacgaacatattgaggagcaacaatgcgtcggaatgcctttccatatcgaaggaagacaacgaagaccatcaggatagcaattgcaatcaccaaaatagtgatgaaggtatttttgagaccaaccttcgccacccagggtgataacgcgaagataaacgccgtgctgaaactattgcgcgtgagtgttacacccactagtgcatctccaacaatctgaattggtgttagaatatgctctgaaagaatcatgggttcagaatggacttacatctttgtacgagtcagttaagtaggtgatggtgagagtgttgataggggtgacaccgatgttatataatgccagtccgacggcaatgacaggccatggccggttgtcattcagcccgatagcaaatagaagtgcgcctgcgattataaatgggagaaagggaatcatacaccagagacgcatctcggggtcgaagatgccgtttcgccggcgagagagaaatagaatccaccaatcactcagtgggccaacaatgagcgcaccgatagagacgccaatcattctcggtaggctcatgaggccaacctcataggaagagaagttatagggagccttgggcagataggccgacatagtagttgacatgacatctcccagagccaccaagatgccataaacaagtgccgtccatgcgatggctggaatagtcgtgagaacaatgagaggttgatacatgtggcgaaagaaggactcgttcttggtattggatgaagaagtggtggttgttaaggctagtctttgccaatacgtcttcatgggaatattcgggttgattgtgacagcagtgatgttgggttcatctgctttgatcgagctgagatctgcgaatccttgctccgcatatatttccttcattctggcggacgaaagcttctccaaatcgtctttgttgcggtcttcttcttgagggttcggtgcaatggaccggtcttcgttcgtggtatccagctgcacatctggagtggcgggagaagccggcgggcaatacttggtctcttcgtatccgaagccgacaacaaacattgtcacaccgaagatgatagtattcagccaccagatccacctccaacccagaccactggcaacaaacccggcaattagaatacccaggtagctagagagaagccacgtccagacatagagagcattcattcttcctcgttggtgcacgaagaaaagatccgcaatggtcatttgcacgatgacctctgccagactcccgaagaagcattgtatgacgttgatcgccatgaggtctcccacggtttgcatcttagcagaccaaatgcagactccgaattgaacgatcgtgctgaacagatacaagggtcgacgtccaaacttgagcgcaaatggaatcagaatgacggagccgactcctaaagcagcacagccagcagcatagctgtcatttaatatctcgctggtgaaaccgagctctgtctccatgggtccccatgttggtgtattggcgttgataaactcggcgaccatagcgacatagaagcagactagtcccatgttcaaacatttccgccatggggcccaattgaggggatcgttgggatcgtcggatggtcgtggttgtagaataatagtttttccatcggatgcagttgcatctgcaaggtgtaatgtaccgggaggccacatggaattgttgccagtaccgctattcggaagcgtcgaagacatattgagatcgaagatgatagaccgcagaactggatgagttgtgaggtctgaagggtgcacatatgtttgccggaatcaaaagttgggcattcttggaatataagaagtcgggtgttggacagtggccatggatgaggccagagagcagaccttctatagcagacagaatctacattactcaattactcatttgtgaggttatcacacaaatccttatctgtttgaagtggagtgctataaaccagtccaattggtggaatgttccgggagtggcagggttaaacgtgtgaactaagatggctgtggagcaaaaacgagggtttccccttttaattggcgtaaagtcccggttcaccccactggagaagtcgattaagtgaattaagatagccgtggagcgaaaaagtggtggaaagtcccagttatcgcagagaacaaaatgcggagtggcgaatgagggcccaccaactcaaccgttctgtatgtagtcagatgtaactttccgagcaagacaaggcggcttatcgcttgactcggaatgctaacgcgccatgtgtcagttcaatggcgagacaggagacaggtggggggagagcggggggaagcggacacgtataaatttatttcgaatctccaaaaattcatcgctcacatctactagataccgttcggatctgcattgggttgttcgtttattttcttcggataaccgacaaaatgggacaagatgcattcgaaaactttggttttccgaaacggaccaactattccatttcgcactggctacaatcggtgcagggcgatcctcttctggatcatcgaacaacaccagagttgcctgcgtctgcagacatagtgatcatcggatctggcgtgagtgtcttccgatgttcctgtaacttgtcggaagggttgctaagagctgaaatagatgtctgggacaataatcgccaaaaacatcgtggaaacctggcccgaaaagaaagtggtcgttattgaggcccgactattctgctccggtgctactggtagaaatgctggtcactgcaagcctgaccagtggcgaggcttcataggctatgagaaacaatttggtactcagcaggccctgaaggtatcaaattatcaaattctccggttatgcctccatatacgctaacgtagacctgcagattctgcaaaacgaacaacagacatggtccgaagtcgtacaatacataaaggagaacagtgtcgaatgcgaacattggagtggtgatacactggatgttccagttaccccccaggccgcggagaatgcaaagaagatctttgagcgctacaaggcggcgggcggcaacgttgaccacatcaaggttacaaacgaccctaaaaaagcagcagaggttcgcaaaagcgatgcatcttcaattgacccggctgacaggaatccagatatcgcaaatcaaaaccgcacaagcatgttatgcgtggccggcatcgacgctacacccctggaaacttgcggcgcacgttatgcgtgacaatatcaagaaaggggtgaacctccaaacaaagactcaagccaccagtgtcgtccattctggggaagatcaacacaagtgggtcgtcaaaaccgaacgaggcgatatcaagtgttccgaagttgtccatgcaaccaatgcttatagttctgcactcgaaccgtctctgcgggggctcatcacgccatgtcctcacatttgcaacaaggttattccacccaaggctgatgcaggctttgaaggcttcaagggctcttatggtgttctactcccccaagacgccctgatcaccatcaatcctcgttttaatggaggcggtggggttcttttcggcggcagcaacccaggtcaagatgagtttatggagtggctagagaaaaacccgcatcggtacattgacgatggtctgactggatttgactcggtcacgaaggctatccaggaattcgcagtagaaggattcgaaggatggccctccgatgccctgaagcagggggagacttataaggaggcctggagcggcatccttggacttgtaagtgcttcgcttgatatgaaaatcaaatatgggctaatattagatcagagcgaagacggcctgcctttcgtcggacaattacctgcacttccaggccagtggatttgtgctgggcaccacggacagtaagtccatacatgtctcccacgctgccagaatggctgtgaaccatgctacgctgacacttacaactcattagtggcatggcacgtatctttaccgtagcatccggcttggtcaagttgatgaatggaagctcttggactgatacgcggctgcccgaggttttccaaatcacggcggcaagaaccgaacggctgaaagagcgcgtgaagatatcacctgttcgtgctcgtatctgagtctccaagcaaaatattgggagtgtggtatggcaaggtcgagtttagtgttagtatgtatttttgactggtacgttcccatggggcttggacttgctaggaccgtgtaaaaaaattcttcatatgatatagaattccatacctcctagatatctgcgcacaataatgctctaccaaaaacttccgccatttgtattatttgctctgatacgcccgaggtgcggcacatttacgtcatagtccaagaatgatgacacatcatcaggtgatttcatcccaaactgcacgtgacccatacaaatccccacaagttctgttgagattcagttaactaactaattaactactaaaaataccatttcttgtataagaaggataaagaagaaacccctacattaaataatttcctaatccgcacattgcgggcacaagtcacgttacttaaccttgtaatctcccaactccacctacaattggggaaagcgtagaaatcacggcaatgcggggatttataagaatcagtggaatgggactagttcactcgttaccaatcacttatttgggtgttttttgtttccatttcggattttcctttggcaaattgatgagccaatcagaagacttggttccatcaatcttgcgagtgataagctctgaaaatgtactgggaaaagagtctccgtgctatctctcatcattctcactacgtccagccttgctcccagaacgtgaccacactgcaatatcgaggccgattgaaaaattgatgggctattttccattgtattctgcttcatgtttcaacctggacataataagagacagtcatcccgaggcactccatcgggaagcaggacaccgctcgcgtgcgtgaaatgcaaagaaaagaaattgaaggtaggattaaaaacctcaagttaagctcagtctcctaatccaataataaagtgtgacaatagggtctcaggatgtattaactgtctccgtgctggatctggtcggtatttcttttgccactcggcttcttccattgatgtgcgggtttgtgatgttaatctgacaccgaatgacagtctgtctcgtggaagatccagtaacgagggcatatcggccgcgaaactacattgaaaccttagagaaacgggtggcatttctcgagagtcttctgaggcaatgtcgtccagatcttgccaataacgacccgctcagacaatatacacttccaccagaagttcagccaaattcagttcccctagcgcaacacatcgagacacctgatcaacggcacggtgatcaatcaacctcatccagagccaaaagtgatgtcgaggaagatgacggtgttgacaagctgtcatcaaaggtcggcctactaagcctcaatgcagctggagcagagcctcaatatttggggtcatcttcgatttttgctttctcacgcctgatcaactcatcccttcgccaagtggtttcctctgactttcccacggctaacgtgcttgattggactgagaaccgctcttccgtgctaccatcaccgtgcttattgcctgcttacgaatcggctgtcaaacttagcgacatttatttccagaatgttaatacacattaccccttcttacacgagccgacctttagggcgtgggagtcgatgctactgaatgagtcgacggaattgggaattcttcttcccaattctgtctcgctgtttttcttgaatatggtaagagagacacggcctcatgctcattgaaatcatactcacagtgctaggtgtatgctgttggcgctttgcttttacccagtctcggattctcagcagaggtaagcagacatttcgattgacttacggaaagctgactggctcttagcgtttatacacgtcagcactaatgtatatcgatgatatcctggcctatgataatctagaagcaatacaagccatcctgtgctgcgcaatttactcacttaggtcatccactggtacttcgcactggtatggacagcatgaatacggggaaatgatgtttcgctgatggcatataggaaactcgctggtctagcactccgtcagtgtattgatctgggttatcatcggaatacaaagcaccttgcagcgcctaaagatctacttcaggtagagttacgtaagagggtattctggtgtgcctatgtcattgagactcaagctgccgtcatgctgggccgacctcttggtatcccttaccaggaggtcgatgttgaagtatgtttgaaattactagcccaaagacacgcattacgtgttgttctaatgtactcttgtgtagtatccgattgacatcgatgattcatgcatcaatgaaactggtcttgtgggcacgccacggagctccccaactgatgcaccaaccaatatgacgagagcgatccatacatttcgaattcgacgtcttttgaatcgaattcacacttatatttactcaaaagccgacccacgctactcaagaaagcacgaccagcagactgatgtgaagaatatacgtgccgagatcgagaagtggcgctccgaaattccacccacagcttttcaccccggtgaagagcttgtcttgtttacgactgcagattggtatgatctggaatacaactatacgatcctacagctttaccgagcccaaatcgtcgatcaccgggtggagactacagatgaggttttccttgattgtctgggcgctgcagagaacatttgccgaagctatcggcatcactttttaggaaagccaacgagatgtacctgggcagcacttcacgagcttttccttgcaggattgacatatcttcactgcctttggacatcacctgccgcacgacaggcagctggccacgggcaagcaagcagcacatgcaatgactgcacaatcgctttagtggtcatggctgaacgatgggatgttgctgcacccttccgtgagatatttgtggcgctcgctagccgaacaatgttgatgatgagtgtcaaggcggatgaaaatgtatctaaaaatgtggcttcggctgattccggtaattgggctgaagaggacttgacggagtggatgagaattgtggccgatgccggtgtgcttgagggctttaacggacttttgactggtttacccagcgaatgactctaccttcagtctatgcttccgaaggacatgataaaacgcgcgttgtgcgggttaagcgccgggaagtggggtccaggaaagagacttagggttggaggttgctagcggtccttgctagctagagacaagtgctcataacctaatggcgtatctgactacgttgtgcctgaaaaggggaaaacaactattgtcgattcgctaagataaaagtggacaagggagagagagagaggaagagggagccgaactatctgatggtgatctgggtccacatgggtgaccgccttccggtcacccaacatcccccctacagatctcatatctcctgttttgaaaatgatgatctagaaatgtcgtaatcgtggtagtcgtaaaaaaaccccaaattttcctttgaattaagtcatcccgataagcttcaagaaagctcggaattgctctttgggaagcgccttcgtaaacccgtccgccgcgttctgctttgtgtcaaccctcaggatgtttatgtgtccttgggccacggcgtccttcacgaagaaccatcggagtgccagccatctggtagcagacttgcctcccttctttgtcagtagcaactgtgaattgatgttgtcggtgtagataactgtgggatcgggtcttggcaggctcagtgagtctgcaaccttagcaagccacatagcatcccgggccggctggtcgagcgcacaccattctgctattgttgtggagttcgctgtgatcgtctgctttttagtagaccaagctactgggactcccgcaaagaaccagatacatccttcggttgatttggagtctgtccagtctgcgtgtgatgcgtctgtgaatgctatgaattgtagttcgtccgactttccaaagatcagtcctgtcttagggttgtgtctgaggtacttgacgacgtgtctcattgcctcgagatcagaaaaagtcggtgttgctagtctgtgttgtaggcgtgtgacggcgaatctgatgtctggtcttgtcttgatggcaagccagttgagcatccctactactgtctggtagtgttcgaagttctcgtcgtcgagtaggttagagtcaatatcttctgggttagactctctccatcctggtggtagtggtgtttctttcgttcccgcagtatctgtaatgcgtagaatcttttgtacgtaggcttcttgagacatgatgatcgtcccagcgttgtaatctctgtcgagtgcgcagttaagatactgctttggttctcccaggtctttcatgtcataatgtttcttgagttgcttcacgaccgagtctatctctccggaggtgggtgcggcaatgataaagtcatcgacatggatcatcatgattgttagatccgcgcagttctttcccatcttgacgtagacacacgggtcgtcctcgaggggtctgaagccggtttgtcgaagcttacagtccatctcctcgttccagaggaaggcagagtctcgtaggccgaaaagagcctggttgagtgtacatacccattgctttgaatttccttctgcgtctgcaaactcgaaacccgttggctgtctcatgtataccgtctccgcatcttttcttgatgcgttaaggtaagccgctgtgaaatccacttgacgccattcgaggccgtagactgcgatgagtgtcaagacaattttgatcatcgtttccgatacaaccggtgcgtaagactcgctcgagtcatcgcttttctcctggaagttgccgcagacaacccatcttgccttgaagccgtagacttcatctctcgtgttcgtcttaacggtaaaacgccattgtcctggaaggactttcgccttcggtggttttaggatcaacgtccatgttctcttcgcggcgaggtcatcaagctgtttttccattgcttccttccattcgttccagaaaggtgatttttgtgcttgtttaaaacttgatggtaggtcgacgtccttgtcgtgaagaggttttccgttgtacatgaaaggtgcgtcaatgtctacctgatcggagttgtctggcgaaagtttctttgcgtttccttcttgaggaggtttgtgtttttccgcacgcttgacatccctcttttgcttctcatattcgacgtttaggagtttttgtttaggatcctgatatctctctggtgggataccgatgttgctcctttttgatctcctgaccgaaggttcttgaatttgagttggtgctgctgttacaggttctgcggtaggtacgataggagtaatcttctcctgtgtctgcgtcagttgcgcagcgtgccgaggcgcttcataagtgtcctgcgttgatgtttgttgcgtagctatctgttgttcactgcgttctggagtctgttgagttggtgaagagaaaggatactggtactctgtccttgtctgttctggggacggagtgtcttcccttggagttgactctcgtggggagctggtttccctgatcaagtcctgttcaatcgagtctgcgtactggtgtacttccagcatgtccatctcttctgcgttgattctagctgtgagttcctcaagtcttctctggaagttggctttcctctctgctagcttttctgtcattgtaatttgctccgtctgaggggttgcattctcactgtgaacagtctgtgtctcctcttggattggagtaagagtctggttgactctttgcgctgttaactgttctgtgtttttgggaattggtgtccctctctgaagtctcccaaggatcgatcttgtgtgccttggtgcagggagtagcctctgtcgacgaggcattaccggggtctctggtatggttgaaacgctgccttgaattgtgggcaagtgaattgttgacggggttactggatcctgtctgtagactgttacaatctctgtccttggttcggttctggctgcgtcgatcagcgggatggaaatttcgtttgtgtcgtcatctcctgggggtttcgatggctttggcgctaccggtactcctccctcctgatcttcgtcccctggttgaggaaagctgacgtccctcgagattgtaatcttcctagtttccggattccagatttttagaatatgtccgttatccccctcataacccatgaggtgtcctttccaagatcttggagcggctttgcgtgcctgtactctcttctccttcggaatatgaacgtagacggttgttccccatggtctgaggtgcttcagtgacggatctgggttgtcgattccgagttctgtgcgccagtgtttgagtggcgatgtttgagactttgggttggttaatctgttgatggtgtagattgcagtttctactgcgtagggccacagctcctcaggtagcttagtatcgatgatcatcgttctctgaatgtcgttgacgtatccgccgaagcgttctaccgcgccgttgggctctgccgtgtagggtggtgtaacttcgaaagtcattcccttttttgtgccccaagtgatgaagttcttaaattctgttccaccatcgagtctccatattccggggtagcgcccagttcggagtttgattttttcgcaaaatgcttgaagcttgacaaatgcttcacctttgttcgtgagagtcggcccctcgagatatcttgttgcgtcgtcgaggataggcatccagtacttttcaccgttcgggccctcaggtttcataggctgcgtgtctacatgaaatttccatgccacgtcctgaacccgaaattgcggctcacgagaaatctgtttcttggatttaccttgaaaacatgcttcacagtcgaagtattctgttccatactgttcttcgtcgtcaagctcttgtgcttgtttcagcgttgaagtaagtttggcttttccagcgtgtccaaagcgtcgatgcgcctcaaaggcagaaattttattgactaatcctgtttcttcgtcactgtccgacccgtaggatgaatcttcttcgtgtgaatcgtcttctttaggaccgatgaggtacggaaccccgagtgatgtgtttgcaactccaacggtttttccagtgccgtctgtaagtcgcttagttcttgtgtcatacgagatatcctgttcttccaggagtttctgcatgccgaacaatttgccgtgaccccttgggctgtagtagccttttgtcaggaaggtgtatgttgttccgtcttcgagacctgctttgacaaggacctctccgtgtccttcagttaccactctgttgccggagtagtcccggtaggcgtatgccgattccgggctgtcctcctggtatgtgtagaaatcttcgaagtcgtgggtgagtgttttgtctgatccggtgtcaatcagccagctgttgaaactatctgtgtgacgagctgttgccgttatggccatattgcttcgcccctcgcttcgcagtgcgatcgagtaattccatacgtgtgggctgtgtgtccagtgtgcgggtggatcttctgacagataggaacacttttgagctttgtgtggcccgaaaccgcagtaggcacacatcccgctctcatccctttgtgttccttccttcttttccttgacatactcatggatatctttaccaggaggtggttggttgcgaagggtcttcttcttcttgggttcgttggatgtacttgagtcatccttcgaagatttgttgtcttggcttgaggaggcttcgctgttacctcctttgccgcccctcttaccacctcgtcctccgcgtcctccgccgcggttgttaccccgtcccctcgaggactgggctgcgttagcagtcccttctctgtcggaaactgcctggaggctcttgcaatattggtccatcttttcgagtgtgattttcttaggttcgatattactaatctcctcgatgatgaattgaaccttggatatttctttatccaattgccgtagaacttgtgatagtgcgtgaaaagggtgtggttgaattttgaatcgcgaaagaacgtggtattgtttctggtattccgcaatgaattccttcgcagtgttgaagtccgctcgtttcatttcgtcgaacttttttgtttcgtttagcgcattttcggccttgtcagagccttgcaccattaacatgatttcatcgaacattgtgtcggcgaattccgggaggtacgagagattctggattcgttcttggagtgtatcgtcaacctgaacgtacagccagctagccactgtgcgtgaccagtactcccatctgtcaaatttcgggtcacccacagtggggcgaggcatgctgctgtcaatgacatattccagtctcaatggcgcgagagcgaatttcacagggatcgcccatccacgaggatttctggaattgtactcgagtgctttgactttctgcattttcgcagccgagatgtcaggtaagttagtggcctgattcttctcgttgtatccgttacccgatgacattgtgttggcctggggttgagaggtgtttcctatctcccgagacgcgttgttattgcctgatggcaaaaattgtgactgattattcgggttgtcatccccagagtcgacaccgctatcagccatgctgagagctggtttgccaattctgttgttgattcctttggacatcacctgccgcacgacaggcagctggccacgggcaagcaagcagcacatgcaatgactgcacaatcgctttagtggtcatggctgaacgatgggatgttgctgcacccttccgtgagatatttgtggcgctcgctagccgaacaatgttgatgatgagtgtcaaggcggatgaaaatgtatctaaaaatgtggcttcggctgattccggtaattgggctgaagaggacttgacggagtggatgagaattgtggccgatgccggtgtgcttgagggctttaacggacttttgactggtttacccagcgaatgactctaccttcagtctatgcttccgaaggacatgataatggcgtatctgactacgttgtacctgaaaagggaaaacaactagtgtagattcgctaagatctaaatggacgagggagagggagagaggaagagggagtggaactatctgatgatctgaacccacatgggtgaccgccttccggtcacccaacacatgagcctcattttgtatggttgctggaatttaactacagcccaagttatcaaataggtttatgcgaaatggtcataatgatatctctaaaatacggattgttgtgacgcccccaaacagagacacgacgatgcaataaccactatgtgacatgaaacatttcgaaagttgtttggaaacgcgcagattcttcgctgtgattgacatgtgatcatctgcctcaactgaacgtcccattagcaggcccaaaatacccgacagctggcatcgacttgtatggtacaccctgggcgtcggcagtattcaagtacacgttattcccccaccagtcagggaaagtggcaccagggtacgagatgcaaaagaaaataacaatgccactgagggcaagacctgtatcaagggcagctgccaagatataattgtacttggtccaccaagcaaagaatcggcgtttaataaagtgattgaaggcaaagttgaccagtgcccagctggaatagttaattccggtcgctaaaaagcatttagttagcttttgaaataaagaggcactggcaagttgcgggacataccaggtgggacgttgtaagttccgacgaaaatgagaggccagttaatatacttccaaaactggcgtctagtataacggtagaggaggaaagtcacaactggagcgacagcaccgatccagaagaagtgcaacagaggggaatagatcttgcccacggagtaaagccgacggggcccaacaagaccccaaataacagatgaagaatagacagtccgaccatttggacaggaaaacccatccgtctggccagattcgcaaatatccgaaatattaccaagcatccaaagtgtaacgccggcctgtgtgagtgcgcccaggatagttgccacaaactgcgctacaaagcaggtacgtggcggcactttcagataatgagccaatttcatatccatggagaagtaaacaccctgtcccacgacatccgtggaaatgatcttgaaaatcatattggcgagtggctttccttcgaacatatatccaccaatgaactcggccagaacattcagctgattcgcatccacgttcgtaatgccctgtacgataccgcagggaaccatgtatacaaccgggatgatcaaggctagaaagactccgtaaacgggaagcttagtctcatagacttcgaccatcgcgatggacattgccatgataaccacgataatgccagcgtaccagtaccacggggtccgccggtacgaggcacggatgagccgagcatgaatatcgagcttattccggcctttgagagcagcccacaggtcgcgactatgccagagggcgatgtgcgagaggactgaggttatggcagcaaatgaaagtccgtatacaaaggcaaacgttgcgctcaggtatggaggcgagtacttttggtaagccactgtatctagagtattatccgcagaaatgactcgagccgtgtcgtagatggcgcccgtgttatcgtacacgtcggctgtcatgagtgggagataagctgtgaaccaggtattggtgtagtaaagggcgggtgtgacaatccagtagaagaacgcgaagccagcaaagacattcaacgcagcccatgatggtgataggagcgggttggtgttgtaggcaatctggctccagtcgaaggtaattggacttagaccgagacctgtctgcatgccgaagagatggttgacgatgacgttcttcggtgcgatccagcagacccaggtgaaataggataacgcagtgaatataagaccggggaaaaaataccagacaaaggcaccggtcataacgtacatgaagaatcggagacgggttatgcgccatccatctgcgatcgagttcgctcgcgaatgcaacgtttctagcatagcacagttggataatacacctggccagacgatgcgagccggctcgacgagccatggagctgcgagacccgcgacgccaaacccaagaagttgtgcgacgagaacaatgagcacgtagaagccgggcttgagattgaaattgtagaagttcttgctggcagcctggataatgtttgtcgcgtccgctgaagcatacccgaaggacacattgctcataatcacgataagcgcgtgctctttgatattaaacgacctgtctgggttgacaacgaatgtgcccaaaggcccgagtcggatggatgtgagaggaagagttttggccaggaacaccccgatcggataggcaagtagctctgctactagggccacaatatgaaccgacggatagcgcagcgaaaagaactgattgataccagatccgagcatagtgaaaacaatgcctaggagccacatccgcaccgtattgactggcatgctagggtcatccgtctcggggacgacagccctaactgtggtcactgttagtcaatcgacatatatatcaacagtgagctgggtactcaccttcagggaatggagagcggtgcgactcatagctgaactcttcatttgtattctcggagtccttttccagattgatttggtctgagtggccttcgactacctcttcgtcgactccgacgagagcgggtttgattgtgtcggaatctaactttttggaatacatggtagaaaagtttgcgcagtctcagcgcttttgcgaaagaaaacaaatggaatacagtgagacacggcgccttttctaggctgattaaattggccatggcggggacgaatttagtccgacgcgtactgaggggaaacagagataaggcattctgacggttggctttccggtggagagagtgggtttagcttaacttgacttaccttagcttcagatagtggactgacccctcaaaaactgtcctatgaacaaagccactagtggttagcctacattagtttgctttcaagttgccgacgaaagatagcgatggcaagcgagataagaagatgaccaggattgagtctgtggccgagcgcaaagccctagagaggcttagtccgagacaaggctcgagaactagaaagtaaaccggtttatggcaaagactccaggccggcagtgttatcattcagtaattcttgtgcaacgaagcacatgttttttaccctttctttaccatgcaatggacattcaacctcgtatccagaggtttcggagtccgactaggactccaaacatgatacgccaagcttcagccgcgggccaagtccaatcaagctttgcactgagtaagctccgttcaaaggcaccaaagccaattgacgacctcaaattcattttcttctgtatgaatattcccttgcggcaactcgagacaccattgtagtgtgtctcgacatatcagatccatcctttgaggaaggatatcgacagcacacttcacaatgatatcccaattactcctcgctatggcagattaaacaaaactgctgatttggcctcgataaaagctgttatttatatctggtctcgtcccatctgcgatttatctatagttaattatgagtttttactccgtggtgtacgttgtagtacgcattgggtgattctggccatgaagtcactacatggctatgtacaaatgctatgagtctagtgttcaaaggccattaattgtactcaatggtgtatcaccaaggctcggctgagcggcctatgcggtcttcgtactggcgatttgctcgccaggtcaccaggtcgcccgtattggtaatcactggtaggggtttactagtgattaccagtagggcatagggttacctcgacctagtaacctgatgaggtgaattcttctaaatgccttattgcagagcaaagcgaagcaattataaatcagaggtcgtacgtccgtacatgtcaggtggccaaatacttaaagcattggtagttagaatcagtcgctttgctctgcaacgactatctcggcggccgcaggccgacgagatcactggcaattcccctcaatcaaggccggtgttgcttacggccgacattatgtgaaaggacccacaatcgcgtcagcatctgcatcggtatcacgtacgcgactcatcgggagctaacatataatcatctttgatttagttatcacactctgctctcatgatacctagttgctattacgtgaaatagtaatggaaatcatctctatggggtttactcatggcaacctgcggtaagagcttgaaaacctattaaagagcggcctaatcccagcttagcacaagaaaaacatcaacgaacgttgactccatattgtcccatcccccttgaacaaagccgtcccagaaaaccatggcgcaattcggattccacactacctctgatcaggctgcagaagctctaaatgcgtcgattcgcaacaagactagtaagtttcagactaaattgtgagccccggagtttgttgctgagaaactactctctcggtcattattaccggtgtcagccccggaagtctcggtgcagataccgcgcgcgccctggtggctcaccaaccagcgcagctgatccttgcgagccaaagcgagaagatttgtgatgttatcgcctctctggacataccgtctgagatagtcgtccgagcactctgcctggacctctcatcccttgaaacagttcgcgttgcggcggcgcaggtgtcggaatgggtagcttctattgatgtcctgatctgctccgctggtatcatggcgacttcgacctaccagacttccatggacggcttcgagctgcagtttgcagtcaaccacctgggccacttcctcttcgccaacctacttattgaaaagcttatggctgcgcccggtggtccaacagtggtgaactataccagcgaggcgcactcgcgcgcgcaaatggatttcttggacgacctgtcttatggcagtcatggcggtaattacaacaagtggctagcttacagcaattccaaggcctacaacattcttttctcggtgggtttggtccagaggtttggcgtgcaaggcctccgatccttcggtgttgacccgggtatcatcgtgacgacttcgttgacgcgtagtgtcccaccagaggacttcatcgctctaggtgagatgcgtacccgtatgaagtattcattggtactggcggcgcttaggtgttcttggttaggctaggttgattaacagggcaaactgagctccgccataaaaacaaagacttcggcagaagggtcatcgtctgcgatcattgctgcctttgacaagtcacttactagtaagtgggattgatatctatggtgttatccgtgacagtgggaagaagattactaatattttgatgaagatgaaaaaggatatttcgtcgccgatggcattctttctaatagtggcctaaaccatgatgccgtggacccagatatggcgaataagctatgggaattaagcgagaagttgacaggactggtatcagaatgagggtgatggatggttcatcatcacgtggcaacgatagcccgtcctgatgtatcatgggtactgtacaagaaatgcaagtttgcactgagctattactcgtcagaggaacggacaaagtatcgatataaaatgccggtcttgtacgcatgttgaataaatccctgttaaacgcttagtagttaccgtagggtgtgacggttgtagaagaactacgttataaatactttcaagaaaattgaaaaatcaattcatgtgggcttttttatagtactgattttttactgacctcctaagataattgatactgaatctctgtctgccagctgccaggtctgtgcttgtcgaaaattgcagtaattgctgaaaggtctcaattgaatttattgaaatatcgcccttctaagttctgggtattagatagatatttaaaccaaaccgacaccgaagatatcatcatgactgtggcctagggcgttttcttactctagaagagtttctcggaggatatcttctgcctctctatatcgtccgttcacatagaggcagtatccagtctcagacttgtactcgagttcttattcttgttgtatcactgtagcctttcctcgggctacgtctaccagctctgttagggaagttgaaataggtatatcgtgaataacagcctccaccactcgtaaggaagcttttgcagtgccgatataatcaattgaaaccaccaagagaagctccttcgcataggctgccgctaccgccgccgtatagccttgccattccttactcttgtgtgaatcggcgtagtcatagataccccgaatgaccagatatggaaagtcattcataagtcctgccgcctccatttccatataatatatccctaagtcctgagccagctgatctcgttacttgccacctttcacgacttgattagcagatccaattagcctgtaatagacgactggttctgtatgttctcgtgagggtcatagacatagtttagatcgatcgcaattcacacatgtatcgcacgcgatatattagtggaggcttcgctggcagaaacaccacctctgtacccacaatgcccaacggtcaatcacgtactgtaccgatggcggaatactttatcatagttttcatccggtaaagcttggtccatcttcttaggacataagtggatgaggaagtcgggtttcgttaccttttttgtgtcgtagatgacgtccgaagccatggtggggatactgaatgttaggtttggttgcaatgcttagccagctagccgagcaacccatggtttcctttcccattactttctctacctagcttgctggaggattgattcattcgcgatttacatgccgtctactactcgaaagatttgcatagtcttcgttttaatgacgacagtgaaagaatcgtatgctgaatcggctgtgcttgctcccgggaagcgttgtgtagggtccgtacttgacggtttctatcgtataacacgaagtgtctttggagatctttcttcgctatgtgctccattgacttgactgtccatgtggtgcttatgtcgtacttatggagtgaggcgagaccagattattagcaaagagaaggcaccaggtccaatgagaaataagggtccggaatgatattccgtcagatatgcgctaagaattgtgggcaaccgcatgcatctggtaacagactacccatgcccattgttaacgaaaatttatccaactgatctctgacagcatagatacttaaactcgggtctttttgatctcgagaaaggagtgattgattcgtattagttttgagagcctgaactcctgcaaaaagacgccatgggtcttcctggtgcttatcatcaaagtctgccatcagaataggattggttttcctatttagatgggacttaagcaacgtcattagctggtcgagcagtgcgacagcagagttaattccatcgcgagttccctgtaccagggttgttgcataagtggatggaatcactccaacaaaggacgctgggggatccgtttccatgagcatgccatgaaactgaacaagactttctcttgatttgagaatacagctcaccaggccgttgagaatggatcgatcgacatctgtgtccgaagtcgtaaagtattttgtcattgcatagtagccagggcatttggctacttcgttaaatgcgtagtccatcgtctgacctaggagactactttcctgccaccggtcttctgccctggcaatctcttggatcgctgatacgcacgtccactccgaaccacctagaaaacagggctccgcatggataaaggcatctgcgactaggtaaggccgccaagaaatgagaagagtgcgacccatgccatgtgtatgtgctgaagggccacgggcgcagaacaggtggcggatgccatgtgaatgaatgatccatgagcgatcactactaccatctagaacctcatagccccctagcaaaatcgcagctgcaagtgtttcatctgctagtgcggcccgtgtatgtaggagagaggccagatggtttacaccccgaccatacatatgacgagcgcacattatggcttctttattgcctcgtgccgcccccatgcgcaaacaggttaaggcgcggagtgcccagatcagtgcctggggaaatgtggaccacctgcctcgtataaacttcatccaattcatctccacgcgggagttgaaggaagcgaggtaacttggaaaatggtagtccaaccatacttcgaatgattcctgcgtttggacattgatcgcctcgtaggccaaatttggagcaaaggcttcgtccattgttggtcgaccgtgttttagggtgatatatcgcgtctggtccttgaatttgtgaccacgatcatagcctgggcattccgaaccccagttaatacaccgcagacattccggacgagttttatcgcactatgtatcctttagttcatgttaccggctttattttgagatcgcctcttgcagaaaaaaacggatgagaggtccggaatgacatggtaccgcaatatatcagcactaaccttgaccttgcggcttatacactgcaaacatcctttactatgagggacgcccggcattcttgttctatctggttgtcccagagtgcacaagatagctaggaactaaagggttaatagtatgaaattctacctccaattggtatatgagatgggaataaggggctttcgctacaccgctccggcagaaaatattaaaagctcccgaagtccaccttgaggatttaattgttattttgttctaatttctcagaggtcacataatcccatagtagtagatgagcatctcctttcctcccgtctctctttcatggttcaacacacaacggttatgagcccggggagctcgtcattgatctgatcttacaatcggtcaatatcctcggttctgtgtggatctctctatacaggggtctggttgtagtaggccgtggtgtccccgtctcgttattatatggagaaggcagagccataatcgagcgaatgagtgattctcacccagattctcacccagattctcaccctatctatatcacacagtcatttgcaatctacctataattctctcccacacattatctaatacatacgaccatagggtgtggaaaacagggcttcccgtccgctcagccgtacttaagccagtagataatacgccattaagtaaatatgacgattataccaccaatatagggtcctaattgtaaaattagccactgatatccaacgatacatatagagatagtgatagtctaaacataccaatcgcaggaccactgacagatccaaccataaagcagtcagcagccgtcccacgcacagtctattaactcccgttagtgtcacgattggcctttgcgggactctctcataattagcctctaaataaaacatgatagcaagcccatcatgcaaagaatttcgaagtcagaggaagcacacaatagaaactagaaggggcccttttcacatgcatctcagctaccttcgttaacgtatcacgtagggcttgtcacgattggcacttgcgaaactcgtactttcccgttcgggattgtaccgttggtcgttccttcctgttcgagggaactcgtttgcgcagacagtcgtaccttccttctgggataaatgaggatagggctttgcccccgaagggttataaagaccccattgttgtttttacatttgttttcttttctttccttctccatacttgatattcgattagcaatgcacttcttttgttgaaaggaacctggcacgtaacagttagtaaccagaagacaatcggaatcaaactaatataccggttcaaagatatccgcaagaatagtctatccagcaaccataaagaaggtacccgtaaagcctcccaaaatacgtattgcgatgaatatatacaaattgatcgccgcggcggtactagccgagcatgtataaagtacaaggatagctgtattataggtattgcgacgcccgaataggttggtgatagggccccaaataaaagacgagaaccctatagcacttagtatacatttatacagagatcagatgaagggtaatctcggaatagtatcgggccgggtagatcagacgaattgatcaggtgattgtaaacgaaatacagggcttctctacataacttatggagatcacgtgattggtgctgcagcactcccgtcgcagcaccgcagcaccgaaccaagggcctggtgctgcggcacttgtcaaggcctacttagtagtataaaccaagtagacaaacccggcggttatctataagcttaatatactatttatggaagacgaagccgccgctatagagtatatccaggactagagaaggaagatataagaagaatatagaaggctgtttaatataatacaggagatagaaaagaaggttttcgggataaaatccttcttccggaggcatcgtctaggccttttaccctgttagggttaccgagagggttttagcttagttaactagggacggtcaacttctcgccggggggtatatagtaaagacacttagaacccctatatttataaccttatctttcaggtaggaaggacataaggcctagctcttaagtaaagttctagagggacagtattagagaatcatcatcaccccggaaatgaaaaacgagttacgagatatctatacaataggagattatatactatggtgtgatctatataatccctatgcttactagctcaccgtcctagatggttggtattgttttgtcgttctcgtcttacctgcttggccaggctgcccatcgtgcatatccctcttcacttggtatattagctctagagttagccatggatgtcttccatggttggcaatcattagtggataccttggcatattagcgccttttcacccaactatgattggtccaggcaatgacacgaccacgggatgatggatcctttccacgccctgcggatgattcctctgtgggttggcagcttatctttctttaaattggctcctgaaaccttcctaggtttcttccaggttcctccaacatgtttcttatggtgagctaagcatttttgaattttctagccttggaacagttcacggattctgtttcgtctcctaccggaatatttccctactttttcttttgatcgccgtcgaccctggctctgagaatcgacgaagtaatgggctcatactccccaacaaaagagactgaaaaggggcttcaagcttcgctagaggggacgactgacggtactcacgtgtcaaatgttgactatggcacgcaactcccccccatcgatggcggaatgaatgcctggctgttcctcgctgcctgcttcgttatggaggctctcgtctggggatttgcattcacgtacggtgtcttccaagcgtactacagcgatatcccccaattcaagggctccggcaatatcgccgtcgtcggaacctgcgctatggtaaaaattgaatatctcatcttctaacccagcccgagctaacgtacatactccagggaatcatgtatctcgacctccctcttgtctttgccgcctaccgacaatggcccaaataccagcgcttcggctgcggtctaggtgtgctactaatgtgtgccgctctcggcctgagctccctcgccacaaatacaaatcaccttatcataactcaaggaatcttctatgcgctcggcggcagcatcgcctacgccccctgtatcctcctaatggaagagtggttcgaccgacgaaagggcctcgccttcggcgtcatgtgggccggcaccggaatcggtggtgtcgtcctccccatcgtcatggaacagctgctgggcaagtacgggttccggcttaccttgcgtggctttgcagtcgcgttgtttattctcactgcgccgctggtctacttcgtcaaaccccgcgtgccgatcgcagataacctacccagtccgccacccccgaacttccggttcatgtttacgtccacgtttgccctcttcgagttttgcaatactatcgaggcgctcggttttttcttaccatctatctacctcccaacttacgtacgtatgctcggtgcctcgacctccctccaagcactgactgttatcctcttcaacttggcctccgttgtcggctgcgtgcttatgggcgctatcatcgacaaactcgacgtgacgctttgcatcctcgtttcaactgttggatcctctatcggcgttttcctcatctggggcttctctatgtcccttgctcctctgttcctcttctcaatcgtatacggtctcttcgcaggctcatacaccagtacctggcctggcattatgcgcgagatagtccgtaaccagccttccgccgaatcaagcatggtctttgcctgtcttgcagccgggagaggtgtcggaaatttggtttccgggccccttagtgcggctcttattaaggggatgccgtgggagggggacgcagggtatggatatgggagtggatatggatccttgattgctttcaccggagttacaggcgttgtgggtgggggaagttatgttgcgaagcgtatgaagtggttatagcctctgctaactcactattgtgccctaccgacgtggtggatattggtggattatctgacaatggctgatatacgagcgcctctagcgatattttaaatcttggagccaaaaatacatgtgttcttagattctagggagttgatgactcgaatagcaatttccaactttaacaatcatccggccatatccgtcgaaacgaagtgccatttcaggccagttaatcacagagatggagcgagacagatcgccattttggagtatcgacatatgtggtgttgaccaaaacctccatcaccgaaatggccttatcaaagatatcaatcttcttatggcctatacttgttccatttgaaacaagcttaaaaggtacatccgtgcactatcggcatctcagctgtcaacgatctgcgcatgtacctggtatgaccgaatcacttggccattcatctgatcctccatcaacacaacacggtcaatcgaggtgggtttgccgagcctgatggtatactggcccttttcattcgaagagtgcatagcatcacttacaataggcttgctataccacgagctgatgaaatcacctagttgcttttaacgggctgcgtgttcctttggtatagctccgcttcgatcaggggaaagatccaactcgaggatacagtttcggcccatggtcttgtgtcttcttccttttatggcgcaaacaaatgcagaaataattacaagctggacagcactaaataaggaactagtatgaacattggatttttgaccgaattctctactatagcagtagtcagtgaataatatgatgattgaatagagaatttctttttttagaaaaaaacatacaacagtgaggattcgctggtggtcacccacccaactactaactcaccggcgnnnnnnnnnnnnnnnnnnnnnnnnnnnnnnnnnnnnnnnnnnnnnnnnnnnnnnnnnnnnnnnnnnnnnnntaagtacggctgagcggacgggaagccctgttttccacaccctatggtcgtatgtatcaaactgtttgtgggagaggtatatagaacaagggtgaggaaattgggcgtggaaaggactaagtgcaacaacaataggcagagtgagggttgggtgagaaatttcgggcgtagaagaggctaataacatataagtggaaggtgatataatggtaagcgccacttaaaaatcacgcgaccggaggtgacaagggtgagtgcgctatagacggggtgagaagccaggtaagaaatcacccaagtcgcacgaccaatgcattgaccctttcagccagacgaaagcagaatttcattggaccgtgtcgtttcccttgaaacgctcggcatgcacataactaaaactggaagcatcataccacaagtactacgcctgtattgacgccccgattggtcaggcctgggccccctcaggatatgtatgcggactgtgcaaaaaaataactagtctatgggaccccgcaccgtctctttttgactatgattccatatttgagtcagattttacaaagacggccatgaacagcctcaagcaactcaaaactgagttcaatgggcttctcactcatacccagtttctgctatagcaagatcgtgcctcgttctccaacactctcatcttagcctcgatttctgatcgcagaccagccaggaaagatcattgaggcccgtggtaataccttcggctcctttacagataattgcgggtgttctgaattagcttcaatcttcctgggaatgccatacaagtaccatttgtaagaacaatgaaccacaaggatttcttagttaaaccacgagtaacttcgacttgcaatacccaaggaaacgcaaatatccgattatttgttcttcacaataatccaagacagtcgtcttgagctagttgaaggccgaccaccagttctcctctctgcattgtgccccttaacgtcgtgccttctcaacccacccggggaattgtaagtctttgaacatttcgtgcaatgcaatggcttttttgacgctgctagcctgggcatttgggtctgctgctgtgttggctttggccggagtggtcgaaagggactctgagcaattttactcgcagatggtacatgctcgatttcatatgcaggaactgactgtagtatctggtcgttccactgggcttctataggctggttagcaagtcaccgtctccaagtaatcagggcacagagtacgaacgagaggaagtattgatcgaacaaccattgattaaagagcattgattgaaggcttcgtgggccggctgaaatggcaactggtgcaaggcagcggcattgtaagcgtcaaaatccaacgcggcatctctagtgaaagaagacgcgacgtcaagcttgtcaccaaccgtaccaggttgggagtacactgtgggaagtataggcggctggaaaaaacccatcatccccggttcaagatgctcaatttccattgggttctggtcctcgaaccaagactcagtataaaatttgtcatcatcactacccaaaccaacattagctctcaaccactctccactggttattccctcgtccgaacgtcagcaggagtgtcgaagacagactcctggcggggagaagcatatggctgaacattacgggtcataatgcagcaggacaggcggggattatgcaattgcattgcaaggctattttgcgcgcgtgatacttgatacgtagatacccggaaaggcgactcctgtccttgaggtattccattgattggatttatctcttttgctttctccccggcttgcgctagcctcattgtccttggcgactttgctgttacctgaacgcctttccgagctggacatttacagtggatagtcatgctgatccaactgccccctcaacacacatttctattgcggccataagaaagctttaattcacgtcgcctttgatattgtaactatttgccgctgacgtgtttgaggtatatatttcaagtcgtcgtcagtaggaagatcactaacaattccggaatggctgcggagacgaagtcaaagttacttggattctcgaattcttgttgctaatgataaaaagaaatcagctccgccaatgtagagtggtaaatacaaggcccaccgtggttggcatgtcctgtggattgggaaaaaatgccatgatgcgattgagtcggccgaagtaggagagacgatcaagtctgacaagtcagccgaagagccgaccagatagcgaataatggaaagagatgggaaggtaaaaaagagaacggtaagctcagtggataggacaagtctctgagtgcgatcggggggtatctatagccttgaagatggtctgtgcggcaccgtgcctcaggcagttgttcagagactcgtgcgggacgcgaatactcagaaatagatggccaatatagtcgcagagaaacgcacgagtgatgatcatgctgaaatacaacttgtcgatgtacctggcggaccaatccaaaattcgagaatccaacattcgggcttatggttgggtcattccgcagttgacggttgcatgtaagacagcacagactcgtacgaaggtgtatagcggccaacagccggatgcctgattttaatggttttatagcctaattaggactagctcttaccaattttagaccggcaggaaattaaaatacctgaattactatgacagatctcctagtaccaaattgagaacagcttgaaagttgaaacatgaagctattcatacccccccccccccccccccccccccccccccccatctnnnnnnnnnnnnnnnnnnnnnnnnnnnnnnnnnnnnnnnnnnnnnnnnnnnnnnnnnnnnnnnnnnnnnnnnnnnnnnnnnnnnnnnnnnnnnnnnnnnnnnnnnggttaaaaattggaaaaagaaagtttgcataccccccccccccccccccaaaatactatttctcatcgatcctaggcgttaaggccctccaactatatgaatctcctgtatttaaagccattcatacccgccgtagtcccgcactttcccggagaaaagctaatagcgcaactgacaccaaggcccaaaacggttggaaagccaagcctggatttcaacacaaagtccccattcctaccgaccgtataaacttcaaactctccgtatcctctggctccggcgtggcgaatatttgaatgtagttttgagaattaaaataggtagaaggcatttgaattaccccatggtaacagtttcgtctcttcgatgtgtacttacaaaagatggtattgagcggtgtcaaaggcggtctaaaactggtaagagctagtcccaattaggcgataaaaccattaaaatcaggcatccgactgttggccgctatacaccttcgtagactcgcaataaccaatcctgtggccgaaaatcaaacccttcttagtcgctgttatcgtggctcggtcgatcatgcatcaacgtgagacaccaatcctggtggcttttcatctcacgtcatgggcagcgagagttttctgaattcgcgaatgagatattcgagaattgaacacgatctcaatagcgtcagcgcaggcaactgaagtatgttcgattccgtcgactgatctggcaattttaggtatctatgcgctggcagctgttggggtacagtcgggtattcgtcattctgtgttttcgcggttattttggcctcagctaattgtaggagaatttgctaggacttgtgtcaggtttagcgggacagattgatacctgagtataagatgcctctatgatcccctctaatggcattatctcccgccttacagtgctcctctgatcgttggtcttagcctgagatacgcgcagttgttcttcactgccactgaccactcaaaccactgtaagtaggggacttggctggtatcacttccaagctgacaaaatttagacaccattgcctccatctctctcaatatgcccagagcaatccctcgcatgttctcacgggcgcccgactgctgcggcgctcagatgtctcgtcgccagacaagcagcaattataacggcaatagggacagatggcgttatttctgccgaaattgccctcgtatggtctttgatgattgggagggcattcgagatgggaatcccttgtgtgactgttcggagttttctcgtgaacagatcgagcatggtcgtgtttttgtgttccggtgcgcgaggaaggattgtaaattcaaggaagaggaaactcaatgattggtaggtcctgacactgcgcgtgggatgcaagtagcgcaggagcatgggatgccgtcaatgcagaatcttttcctatatactaaatgtcctggcatttcgaaaattcaattcgcattttccgaaatgcagacgggcaattgatttctgagacgtacgtacggtaccacctacctaactatggtgtacatatattctcacgtcgcttcgggatgctctcctcttaccacccaccatctcccgagttttgtcgattccaaatcaagttctttcatgatcttcttctagtgtctttcccaaattgtactccatacacattgacgagtggctctagtcacgccagctgctcgctgacgagtctcatcatcagactagaactttagcggtcttgacatgtcgcagatctgctaggttgaggcaagatcctgacatcgttatttctcaacatattattgcttcccaaatttccctttgactactgtgatattgacttctccggattccaatcatgtccagtcttcacggactccttcatcgacagcgaccaggaccgtggcagagattccgggcccggccttgcgtcttcctcgcataaatgctttacagttggcataaacctattccagctttgcctctcacaaacattcctgttgcgattatctgtatatccgatactcataacaccaagccccacgttccagatggtgacatccttatccatgctggtgatttcacacagtctggatcttttcaggaacttcaggacgcacttgcctggctacgcaacctaactcatgctatcaaaatagtgattgctggtaatcatgagctattgcttgattcagcttgggatgattcgctaggtcaagcagcctttgagcgagctcaactcgactggggcgatattatctacctggaaaatggggaggtaacagtttcctgcccgaattttcgccagcttagggagttcgaccaaggctccatatatgtggccacgtacatgaggcttcaggaaccgagtggatggtgtttaacggactccaggaggcgtacgagcgtactatcgctacagaaggaggccttaagaatcttctgcttgcaacgtgggagttaaccaaggcaatatatctccgcccggttgtagaggcaaaatgtttacttataaacccatctattgttggaggtttgtgggtttgtgggacaatgaacggaggcagccggtcaatgtctttatataatgttgcaatcctgttgttcaactgaatttagtcctgcctctcttgcctttcaactgattctccattgactccgcaaatttatggttaggtaaatgtggttaatggcgtattatcgcgatgggatattgagtaccgggccggtcaatttcgacattctaggttctctcatgaatcgcgctgaaatgcgagagagctacctttcattacttattcaagttacatcttctatccaaagtcggccatatctgtgtttaacccgggaatactcgcaatcagattctcctgatgaacctcctactccaacacagagcgtcctcctcttcccctaacacctctatccttcaattgaattcatcacaccccagtcaccctccgtccaagacagcgtcatcttaaaggcctcaatcttccacagtccactttcattatcctttaccaaatcagcatagtactgcgccccagacatcagccgtggctgatcgggctcattccccttcccaccgcggtagtgctgcgcgagcgcagaggcagtcgccgcggccttaacgccactgtcggcgatgtttatgcggatgttagtgacgaagtgagtggtatccagcttgctgatcacttcgaaacagtcggtgtggatggcaggaaggcccgagaaggtcttatcgccgatagagaatgtagcggtggaggtgaaggcggagtcaaagagggccaggtcattcgtgtctagcccgaggacgcagcgatagagtgcatcagcgatggcgtcgcggccgctcagggtaggtgttagggctgcgggcagggagaaggatgtcatggtaataatagatgatatgggagtaagaaggatcgttggagtgagaattgtaggaaaagccggggtattcctatcaaagaggaagcttggcgttgaggtgcgaagcgatttagatatatagacctcgatggttgttaactccgctgaaccatttatctccaggaatccatcggagttaaggctatctcggacattaccagcggtctcatatacagtgttatgtgctgagcaggtagatatgaccttatttccccacctggacttcctttctttctctctcctagctagcaattacaacgacatcttgcgaattctggcctcggataggcccataaggcgggcagagtactaaaagagaaacagacaaccttagaagccaatagttcggtcttctaatgcaacacatggggagtactattgttagtacatcatacacgggaacgaggcctgctaaatctccttgaaatatttgcagaaggtgcaagcttaatctgagcctacctagtcctgtttctcgtactgtgtaccgcgatatatttgcagctgacgccggcaggcacacttgtactcctgtccctggttgattctcctcctcctactcctcctcctcctcctggtgctgagggaggcagagaagatgaacatgacgatgagttgagtcctcgaccaagaagaagaaagcggttagtcaagtaatcttcattggtatcttacatatctcatttttttgtaaaacatgactacgagcacattgactatttccaacatctatatcacaatagttgagctcggcattatgataaggaaaagttaaaattttgctatttgctccctacttgagcagttcaagttttacagctctgacaactctccaacacatgcatcatgacgtggcccgtcttgtagacctctattgacaaaacaagtttactaatagtaacaacctcatcgataactaactacagagccttccaaatattaaaccagatgcttgataggtagttctcatacattgatcatgtagaataaatcacctgaccacggggaaagcagcctagtccaaaagcggttagtggcgattcagctcttggcactcacccgtgagttttgcgtgtcgcgaccaacctccccaagtgcccccagcaacccgtccaatcatcactttaggtctcctcttccatctctcgcggccttcattcacgccattactggctttttactgtttaatcgtatactaccattgcgctttacacggcagacagactgatacggaaagaagttgacattccgccgaccgcgacagctgtttgccttgatccatcatggatgacactcacatcaaccaagctgcggcccacgagaatgtccagtctatgactggcctagatggcgcagctgatgcagctcgcggagcctctggtatgcctactctcaaatggcttttatgttgcaccgagtgctaaatttgtggacaggagcgcaatcgcgccagaattcgcccgtgaagaagattgagaatacacctgggtccgacaatccgatgtacgccccagcatctcccaaacctcgccacggcggggttgaaccggaagacgaagagatgggtggtactgagaccgatgccaagcccgacaccgaaggcttggaggatgctgcgggcgagtcgcatacgcaaggagagggaacagatgggcttgaagatgctgtgggtgaagaacaacccgcaccatccaagtcgtctctggaagccgccgcgcgcgaacaactcgtcacgcaaacacacgccatcattctccccagctatgcgacctggtttgatatgaacaccattaacccaatcgagaagaaagctctcgccgaattctttaatggccgcaaccgcagtaagacgcctgctacatacaaagattaccgggacttcatgatcaatacctatcgattgaaccccatcgagtatttgactgttactgcttgccgtcgcaaccttgccggtgacgtctgtgctattatgcgtgttcactcattccttgagcagtggggcttgatcaactaccaggtgaatgaccgtgttttcccattcaagcatcttatctaacatctctgcaggttgaccctcagacacgtccgtccaatattggcccgccattcaccggtcacttccgagttgtcgcagatactccacggggtctgcagccattccagcctgggccaaaccacagcgtcacgtccggcaagtttcatccaggcacacagcgtgctgtctcttccatccctgcatccaaagacgacctcaacctcgaactccgccgcaccatttacgatgaaaaaggcaaggatatcacctccgccaaagataaagagaaacagatcaacggcgaagcaacaaacggcttggacattgctcgggaatccaagaagaaggcacactgcttctcttgtggtattgattgcactaaacttcgattccactacgctaaatcggcttcgacatcagccaatgccgctacgccagacaccaagtatgatctgtgtcccaactgtttccttcaagcgcgaatgccttctagccacaatgcctcggacttcgttaagctcgaggacaagacctactctcacttcactgacaaaaacactccatggtcagactcagaagtgattttgttgctggaaggcctggaaaacttcgatgaaaactgggaacagattgcgagccacgttggcacacgatctcgggaagagtgtgtcatgaagttcctacagctagagatcgaggacaaatacgttgaagatgtcccagagccgcagttgggcagcggacgcgaccccatcagccagtcagaaaaccctgttctttctgttgtggctttcctggcccagatggtggagcccgcagtagctgccgctgccgccggtcggtccgtcgacgagatccgcaaggagctccggagccagctggagaaggggcatgacaaaggcaaagatgcagtcaagtccgaagattctatggacgtagatcccgcacgtgaggccgagcagcaatccgcgaagcctaaggagactctcggcaccatcgccctggccgcatctgccgcgcgtgccggagctcttgcctcgcacgaggagcgtgaaatgacccgcctagtctctgctgcagtcaacgtcaccttgcagaagtttgagatcaagctgcagcaattcaatgagatggaagagattatcgaggctgagcgtcgtgagttggagcaggcgcgtcagcaactcttcttggaccggatgacattcaagaagcgtgttaaggaggcccaggatgcgctccagactgtcagcctgcagggccccaacgaacacacgcatcagatgctagccgatgctgctactacaggtattggacaccactacagcttccagcctgttggcggagatatgcgggctggaacccagcctctaagcgcccaaggtggtgctgactacaagacccttgacctgtaggcttcctcaatacatgtacgataatccctcatggatcttctgagagggaaacctaaagggacttttgtttcgtctcgctgagttatgaatattctgaactttctggcttggaaaaggcgcacttttgtgcccttttttttttttttttttttttttgttatctgctggagttcttttctgttgattctccctctctccagaaagtggattgttcttagggggttgaattaggggttggggatcttttttcatcaatgtgtttactctttaatcatacgtccttgatgggaagcttgtaatcttgctcaaagtagagtgtaatacctctcatcgcctattgagtggcctagttgaccgaactttgtcttctaatattgcaaccaggactctagcggttggccgggtcttctccttgctccgactcatcctcatcgtccccactctcaactactgcatcgtcgccagaaagaaccggagcggagatagcaactgccggttcgttgtatctgggccttttcagcggaggcatgtccatgtcttccttcagatcggcgaaatcgtacccgtactcctcccactcgctacggtagacggtccgatcccgccaattaaagacatcttctcggattctgcgttctggcagtagcttagtgtcttcctcgacttcttcttccttcataggttcgtcgaggttgaacggcacgggttgttccatcaacttcagaagattggcctcttcgcgatggctgatgttctggtctgtgagttctgcttgctcttcttctgggtctatttccagttcgtctggcaatacaaccggcgctggtgtttcggaggactcgtgcgtaggcaaagggtagttatcaaggtcgtctagctctgaatctagttccgaatctggttcgtattcaagttcagattctcctgtttctggttctggtgttgcctcaggttctgcttcttgcgggttgactgccatttcggtctcatcatccattccgacatcgtcgtccatttcaatgtcatcgtccatgatgccgtcgtcttcgctgtcctcttcgttgtcatcattatacatggttccatctttacggtaccgggtccactcgtgtgtttcgatgatctcctcggcttcttcgtaggtgaataccgtaggcacccagcctttccggttgttgatgtcttctaggacagtttcattgcgacgagcgatttccacgaatttaggcctgcattgcttcatatggagcacatcgatggcggcccggacatcttgcgttcgaacatacccctttctatcattcccactgcgacttgaactgcgcaatcttgacattgcaaagaagagtgatgattggaccaagcggcgcgtgacactgacagtgagggagtagaagtccacggcagtatctgcagtcatagaaggggtatgtccatacgatgtgattaggtcttttctgttggcaaggttccaccagttgttctcagcttgctttccaccaaagttcatgaacaaggcggaagaaaggcgaatccaatatggaaggttcagcaaatcagctgcgaggcggaggtcacctcgagcactgtcgtccttttcgtctgccagaccctctgcatgagctccagtgataatccagttatctccgtgttggtttgttcccgcttgagcttcaagaagggactctttcaatgatagaacatccgcatattcctctagtagttcgcagcattccgggctgacctctgtggccgctgggatatcgctcaagacaggcataacttccaggtgcacgtcggaactatactgggcctccaaggccttatgcaaaagtcggatgtattccataacctcgagttccgacttggtgccgattgcagtagcaatctctttgatgctgcctttgccctttcggtccaatgcattgaagaacacttccttctccgtgggcgtccagaccatcgagccatgttgactggcttggtatgtgctctcgagttccttcaacgaggcataatcaatgacctcatcgttttgcacgataaggtgggagtaggctcggagaaatgtgagaggtccacgcatctgcgggacgcgtgccataagcgcatcgccaatttgtcgtctgaccccatcgaatgacgggtcgcggttgtaatcatatccgttcggtatttgatttggagttgaagagcgttcattggacgagcagtgttgctcaaagtcggactgaggctctggttgttcgaagtcagactcaggctcgaagtcggactcggactcggcgtcgtcgtcgggctcataggcggaagcagagtcgctcatcgttcaggctcgcagatttgcagcgcatgcggaacgatcggtagcaaaacatcacagctacgcccttaacgaaatctgccacgtcaattcatcgaagagctatagaaacaactgaaaaaaaagttgagaattacaatgtatggtaactaacaaatttgaatggacatgatgacaaattgtaatatacagtgactgttcataagtttttaacacccccacccatataccgccttcctatacagtctacaccgcgtacaaaatacgcagcaagtatgggaaatgattgatctagagcacctaaagcatctctaagacaatgcctcgtgtacaggctatcattcatagtcaggggtggtatgcacacttttgtatggtatgccccgtaccgaccgtcacatgacattctgaatgtatttaaccgttgccaagattgttttatgcaacgttatcgataagattgtttgcactgtttgttcttgtgtttgagcttcgccggagaacaaaagggcatttgcaacatctgcatggagttcatacgctgtgtctcgcgattgagacatccaagaagatacttggtgaagagtcctctgttacaaaattatttgcgccatgtacgcttcaattcgaccgagtcttcagttcctccaagcattgtgctccgggactaccaagaggaaagcattcagtccgtcctgaaatatttgggtgaaggccatcgacgtctggggatttcgcttgccacaggagctggtaaaacagtaggttagactcgctctctatccaaaatggtactgatctttgcaggtcatattcacacagcttatcagccgaatccctcctcgcgatgcgaaagccaccaagaccatgatcatcgttcatcgccgcgaactcgtcgaacaagctgcgaaacactgcagagtcgcctatccagacaagaccgtcgaaatagaaatgggcaagaatgttgcgacgggagcaggagacatcatcatcgcgtcggttcaaacgctagcccggggacgcatgtacaagttcgacccgagtgcattcaaactcgtgttggtggatgaagctcatcatattgttgccaaaacataccgcgacgccctggggcattttgggttgaacgagccatctgccaatggaccggtcttggtgggtgtttccgccactttctcacggttcgatgggctcaaactgggtgctgccattgatcatattgtctatcacaaggactacattgacatgattggtgaaaattggctggccaatgcagtcttcacaactgtcaagtccggggccaatttgtccaaagtcaagaaagatagtttcggagactttgccctcggatcgctttcggaggcggttaacactacgtctacgaacaacatcacagttcgggcatggatggcgagtgctgagaatcggaagtccactcttgtattttgtgtcgatgtcgagcacgcgcggcagcttaccgccgcttttcgcgaccatggcgtcgatgctaggtatatcacagctagtacatctaaagtcgtccgtgcgaaacagctacaggcttttaaggaccaagagtttccagtgttgcttaactgtggtcttttcacagaaggcacggatatcccaaatatcgactgcgtgctcctagctcgacccaccaggtctcgaaacctgctcgtccaaatgatcggacgtggtcttcggctgtttcccggaaaaaaggactgccatgttatcgacatggtagcttcactagcaactggagtgctatcaacaccgacgttgttcggcttggacccagacgaagtcttggacaacgccagcatggaagacatgaagaagaatgatgataagggcactcaatcggaacccacccctgaggccgaggaaccatatgacggctcggacaatgacctaaaacttcagttcacgacttatgacagtatatacgatctcctaggagacatgcagtccgaacgacacatcaggtcgttcagcccgcacaactgggtccgggtcggcgatgaccgatatatgcttaccgatatatctggctgggtaacgattgagaaaggggacgacgatatgttcacggctcatcatgtcatgaaattcaaaaacccggcaacggacgcaccgcaattcacacgtcctcggaagatcgccactggctctgacttagaaagcattgtccgggcagcggatacctttgccagtaccaagtttgatgagcattacatcgcatcttggaaaccttggcgacgggcccaggcaacaccgggacaactaaagatgctgaacgcagctcgcattcgagatggcaatgtgaagcccgaggacttgactcgcggcccagccgcccagnnnnnnnnnnnnnnnnnnnnnnnnnnnnnnnnnnnnnnnnnnnnnnnnnnnnnnnnnnnnnnnnnnnnnnnnnnnnnnnnnnnnnnnnnnnnnnnncattcgagatggaaatgtgaagcccgaggacttgactcgcggccaagccgctgatatgattacaaagctgaagcatgggggcaagaaacgcttcaaggacttggaggttcagaagcggaaaaagctgcggcaagtagatgatatggctgagctgcaaagaagagttgatgtgaaggtcgggccagtcgatgcttgattggaataacatgtggtgccttgtaaaccattggatcaacgaacacgtttaacaagcgaaatttttctaaacagtcgcacaatgcccgagagttacgtgactatgtgccgaagagctccaactgtacaaagtcccagagcagcacccgtggcattattcgaagttgagattagtatatccgtgagctctatcacttatatattttacacttgtctcgggatatatttcggcccaagctgggcggtatgccgagacagaccgaggagccggtgcatactacataattgaaaatataaactttacgaagatgattccgattcagacggtctttcgggtatggctcttgatggagtcaggaacttgtagttacttggaccagcacatataggtttacaggtctacagcagtcttgagataataacgaatgtttgaacagagaattgaattgaattttgtcctagcaaagcatatgaaattcatcaaacgatcataatgtgcatcaataaacgccccaagtgggcgttcaaaggtcatcctcatcggagaacacctcctcaccacgcttgcggcgggcagcacgatccttcttcttcttgcgaagctcagagcctgtaagagaacaattagaatttgaacattgtgatgcataaggaagtaatgattggataacttaccagtaagcttgaccttctttgtaacaacgatcttgttgcccatggcatcgaacttgtcctcatcatcgtcacccttggcgtcgagacgggggccagagccctgaccctggacccaattgtgtccggagggggtcatgacaccgtcgttgacggcccagacttcctcagtcaggtgctcagtgaactcacgggagtgagtaatgataacaacaccaccctcgaaagacttgatagccttggagagggcaccgagggagtcacggtcgaggtagttagtgggctcgtcaaggacgataaggtgaggacgctgccacgagcaagcggcgagaacgaccttaacacgctggccaccggagagaccgcgcatgcgagagtgagaaacaagctcggcatcgagaccaaagttggcgcagtgctgctcgatctccttgcggacaaggggacggaactgaccggaggcgagggcctccttctgatcaacctcagcgacctgcttggggtgagagacaataatctcggagcgaggcaaccaggtgttgtcagcggacatgagaggagtccacttctcggacttcatgccgacgttgtcacccagagaccaagagatctcgtactcgtaggtgttcttgaacttgcgacgagagtggataccgatgacacggcggagggtgccttcaatcttgtagatcttgtccatggccttctcatcctcctcggtgacgatcttgttggcacggtccatggtctcgcggtcctcaccggtctggaaacgccactggatgtactcggaaggagtggagttgaggtggttatcgatgtgagcgaaagcgtgctgcttaatgtaggcaatacggatgttctcgtgctggtagacctcaccggaggtgggaatgagttcaccagtcaggacgttaacgagagtagacttgccagcaccgttggcaccgatgacggcaatacgggatccaagggagacctggaaggtaattccgtgaatctggggcttgggggtaccggggtactggaaggacatgttgctaacacggcaaatggccttggacttggtcttaacaccctcaaggaaaccgggctcggggaacttgaactccatctcggaggcaccgagctcgtagtaggaccgagcagcggggtgctgcttgacgaactcggagagggtaccacggtaacggcggagcttgaagcgctcgtagtgaacgacgtgctggatgacgttgtcgaggaacttggagtcgtgagaaaccatgatagaagtgcagggggagttcttcaggtactcctcgagccatgcgacgttcttgacgtccaagtggttggtaggctcgtcaagcaagagaatatcggggttctcgaagacagcacggcagagagcgagcttcatcttccaaccaccagagagggcagtaatgggaccctgaatctggaactcggagaaaccgaattcgttgagcagcttgccctcgagctcctcacggggagggttctgtccaacctcagcaagcttcttctgggtccaggcaatgacggtctgctcagtatcggcagagtcgagatcgtgctcgacgtagacggtcttgacctcatccttcttggggaaaccctcgagctgctcgttgttgatggcacgcatgagggtggtctttccggaaccgttggggccgaggagaccgtaacgctggccacgcttcaggcgcaggtgagtctggttaagcagaatcttggcaccgtaagccagggagaaagtgcagttgcaaagatcgacaccttcctcctcatcggaggcgatggcatcagcggcggcggcatcggggcaagccttcttgcggagctcctcagcgatggacttagcattctcctcaccgacgatggcagtgatgtaaggcatggtgttctgggtccagatgacgtggtcgttctccttctcgtcaacaagctgagcggcgatggcagcaacgtaggtgatggcctcctcggaatgggcaatgacgtccttgtgcttagcctcgaggatctccttgaggatggcaacgatggtggaaatgtcaccagcgcgggaaacctcgggaatcttgccgtccacaacgttaccaacacgggaaagggtgtcaagagcctggcgagtcttctcacgggcctcggggtcggcaagagtctcgaagttcttgttcaaaccgggcaacatcttaggcaagaagggagcgacaagctgggggtcctccacgagcttacacatgttgtcgacaatgacagcggtcttacgcttgatggcggtctcacgctcgacgagaccacggtcaagcagggggaccatgatagcgagggtagggccagtgacatcagtgacgaaagtagtggcaccgagcaagtgaacggtctcggcgacgttctcgggcttggcgatacacttgatcagctcgggaatgaaacgctcaatatccttgttgacgatcagaccgcaaaccttctccatggtggagtaggcagccttcttgatctcggccttggtgtcccacatagcctcggagatgacggggatcagagtgggaacctggtagccaagctgcatctgggcagactcaacgaggatgttgatgcagtcgagagcagccatcttttcgggccacttctgggcgttggcgagggagtagaggataggggtgataacggccttgacggcgttaccgctgacagcctggacaatggcgatagcggtggactgggcggcctgcttgacggcgacaaccttgtcaccaacagcggcgaggacagggccgaggagagccacgaggtgaggctcaacaccgggagcgattgtggggtgggcggcaatagcacggataccctcgcaggcacgctcacgggcagtagcatccttcttgttggcgagctgcttcttgaagatctcggtggccttcagaggaagagtctgctcggcgataggaccgctgaagagagtggcaaggttggtagcagcggcgttggtttcgtcggcgctggtggagatgttgaggttcttgatgaggtcctcgaggacagcgaccgactgggcggacgccttgccagtggcggcaggagtagcgtcggaggcggcgggcattttggaagaaattttggcggttggagaagagaaaagggtattagagtaaagaaagaaaaatcctttcttttttttctatgaggggtatcgtagaatttttttttttgagcaaaagactcaaatgcgtcaacttttcagacgcgggcgctcaaagattggagcgagacttttttctattctgtctatgcagagtagaaaaacaaaaaaaagaaagaggccgaccctcgaaaaaaagatgcaggagtggaggagaggagggggagaagggaaggggggtgaggatatttatcgtgtggcataacctgggcggcaaaaccctatgaaaatggaattcagattttttctgaattttcaggctcatgttccgcgctaaggtcgaattaggcttagctgattcgttgctgcactatcattggttgaagccctgctttggtccgaatcgcctgtccatgattggttgagcccgttgcctggctggatttggtttagttggtggcttttcttttattttttattcgtttcaatattatattgatgtctatgttgcatgttgtatagagcctatacggagaagttacgggcatctggatatgatgtgaagaaacactatctgtctgctctggctctcacctcgagtcccgcatatctcatgtgcatatccagaaatagtctagtccctatggtaccaacacttctatcctcgttgtacaatatacaaagtacatcgtaaccagcaaggcgcgcgagtcgtcgttcgccacgcacgacaagtggcgcagtgccatataaacgccaaatgaagacccccgagttttcccccaggcactacatattttcggagttgctagggtgttgaacgttattctacttcatgggtttattgttcctgtattcgcccagattcgggcttggtacctccgtgtcaactgtggatgcttaccactgaattacacatgtacctatcctatccgagactatatccgagactagatatccgtactccgtatgtagttgacatgtaggtcagagctgagtatgtttcagcaaaaataataatcatcggataagcccgtacaaataatatccaacagccttcataaccacctgaaagtgacaattcgtacaatatatatgaacgtccaattaaacgcgaatatcaaccacgggatgtctgagatttctttcaccgcttgatttctcttatcgcttatcgcgtgttttatacaaaaagccctccaagccctcgtacgttgtacattgcgctactccgtactaataataacatcagacgtaagcaactagaacaacaaaccgtcgagatcctatcccccgcgaaaaagaattatggtggcaaaacaaagaaacccaaacccaaacccaagccaaaagccaaaaaaaggaaatcggctcagtcggacccagtggacctgaaaacctaacaggttccttactttcaacaatgcctattgaaaaaaaaattcagtcgctacttcgtatagcatggtcactccgtaggaatccgagatttccgcgcgagcgaatcacaagggaggaattcttttttttttctgaaccaaaacaaaggttgcatctgacagtgacccaagttcgcaggttcgcactcgtttcttttccgtttcatttttgtctgaacgtggcgttccctcgccacttggcacttcgcctacgtcgaggcgaggtcatcacattctacaccgtatgcctcgacatacggctgttctatgttgtacaatatcatagaaatagagtaactagtggcaggtgtcatctgctgatctagacatgtcgttttgatctttagagagtggatccatcatggcatctgtacccggtgccccagatgtttatttgatggggaacggaggcgaatcttcaatcttacttagtctaacccctttataacgagttagctcagttatgctagacatgcatttagtcctgatccaccattgaatccggggtagatgccgtgtaaggaggttgtactccgtagtgcaattgtgatcttgttgcattcgaagctctgatcctttcatttctgatctatttacttctgtttcttgtacgttttattctttcctctttctctcacggcccctttttacccatgcttggtgatgtatccaagcccctttttgtggcgtagcgcttagacccttccctttctctctgatatatagtcctaggggctgggctgagatgacgggcctatcactttgatgaagcagaaataaaggggtaacctatcggaggtcggtcatctccacgctgggaaataccttcatcgactccacatttatcgcaccgtcttcgctccgtccaactagtctcgctctcgatactttcagccaagagaacgtctacggacacactcttttacttgcgatacactccccgctaaactacttcgagtacgtctcccgctggccgcaaattttaatcagcttgtgtaagccttcatcctcaccttcatcaccaattcttcatcgaccttgaccagacttgccatccttttgctagatagctaggtatctatgtctcatcgtggtaaaggttacagacgggcacgcccgccacctcgttttaaagagtataaggcccaattaaatgctacccagggtatcctttgcccagattgtcgtcaattcaagcttcgatcacatggctgtgacccagtttgctaaacctgcggcaatcattttaccccacagactggctgtccagatttatgtgatactgctccctgttgtggctgttgcgataagaaacttattgataaatcgtctgaatcttttatgattagcactaatgggttaccagtccagaaggtatagttgtcttactacttagttataagaagtttatacttactaataggatttttctccttttaggttattttccattatttatgacccgttattaaagtacttctcgacttcgtccttttagattagaccttagaggctgattttacccataccccctactatactatagtattagttgacacggtgagcggagagccagaaacggctgccattgcaccgcccctctgccgtctccgaccgcctgcccttctccgctaccacatccgacaatggacccacatctatagactgagagcccgccgtgacttgttgcttcggatttatgttgcaacgagcttcgcggcatttaacgcccgtctggcatggtcagccggacatccaagtcgcaaaacaactcctccaaatcaactaaagccctaagacaccctgtcataattgtagaggcaccaatacgttgaacaacggagtgtatttcgagataatcaaggagcccgttagacaatacgttgaacaacggagtgtatttcgagataatcaaggagcccgttagacttgatattcctggacatagcaaatgcaatgatgttgtaaagtaacgatatccgtagaatccgtggatcagtggctcgtcctcataagtccactggtaggtaactctttaggtcgtttgccccgtttttcattgctgtatgtttcccactgaggaccccaaaatagacgtgcgcttttcgcaccaccgccattttgggccagccttaattccttttcgcgcgctcgtactcgttgactgtgggttttgctttgacgtttcctcctatttcttgcggcgatctcgtctgcactcttgcccgtaaatattcttcgtagccagtccatgaatactagcagttgatcgggttatcagatgcggtatctgcagccccacaacttttgaatggtgccagtgagaccaatggactggagtgtgttctgtagaacagagatctttgtctgattttacggatcaccattagtatcatatgcggccacatttaattgatcatacatacgctgggtgcagaagtcaggtaggctcaggggttaaaatcaggtatagacccatcctattaattggatttcaaataaaccataaagccacgtgactatctttgcttatttactgtatcgtacgctggcatcccccaccactaacgctcttggacattttgattcttttgtccctcggcctagttagtgccctggcaacaaaatatccagccactcggcagagaacggaccagccagggtgcatggatctacaatctcgcagactcgagaggccggttctgttacgagccaattcgattcagaagaaaggagtgcaattcaaaccaaattctaagtacgaagaagaaaggaaaaaagagaaactatctgagtgcgcgttcttcccttcttatacccttgcgtttgtcttcgcttaattctcgttcgtccacttggaaaggtacaagggcatagtcgttcctgcctcgtttggcaagtacgatccttagatcgtcacaggttctatagttgctcggcgttttctttgtgcgcgccatgtcctgctgctatttgttattctttccatgcattaccagtttgcagttttggactagcgtcactctgaagctaactaaccgaattgagaatacatacaaaatgcatgtcttaatggttgagatatatatttccagctgagcatcgtatcatcacaactatgtagcctttcaattttcttgggatcaatacctaggaaaagcgttgagaagctttattgatacctattaaatgaccatggaagtaaacaagaacacggctgctataatttgaagttataaaatatcgcatttactatgtgttttgggtgggcggctagcttagaaattacgttatccaaggacaaaaaaaagatgtataacgacagctgtgtgattcgaacacacgcctccgaagagaattgatttctaaattgggggttagtaagagaccttgcttggtcagaggtattaggtggaactcaccgagctgtgtaaggttagcaactgctgcttaatttggcggtgggatttaacatactcaatcgccttagaccactcggccaaactgcccttagatgctgaatttctccactattgaatcctagtggttactattcttaacctcagaaagcgaccgtccgtagcacatcagtatcctgagaccatccatgtgacaaaggacgctatttctggccccaaaagcggcaattttcggcgtcaatcccacatgtcctcatattctagatgtaaaccagaagtgggcaggatacatggcagaaatatggtcgaattctaagtagtacccaatctggaaggcggtactgaactaggtgggagataatgtctgcaatgcctccgccctcttgtacctctgggtataaccctcctgatctatagaatacttatcacgagcaccgtgcgccagctcaactagcgagctgaccgtattgcaaatgccgcgcccagttgcgggtgagaacttgacaaagcgatagtcccgctgggttgcaaacgcttcagcttccgcgtgcaacactggggcttcaccttcacccatggcggcgatcattatcgcaagaaagggggggaccccgtcttcgcagcggctgcgcatcctcccgcaggcggcgaccatttcgtcctacgatgtcctcgacgaagcgtcgtacgtgaagacgagacagacatgctgcatgaggcagaggtaagctaggccaacgtgtatcagagaggctagccgggcttgtacgacgtgcataggtactccaagagcccccttcgctgcgtacatgttgtacatattcttcaatattattgagtgttggcatgcatagacacttgaatatatggcctgtctatggcagtaagtctacggagaaaaatgtgaagtggtacagattagtatgtgggaatgcacaattctataaaagaacaaaaacacacagaaccgccaacacgcccagaaccgtcaaacagaatcagtccatcctcgaacccgcaaatctatgtccagtgatcgaacaataaaacgaagcagaaagaaaagaaaagcacaccaggatatatacaagacgtcgtcatagcagccgccagaccagagaacggaatctgaagtccggggttgcgggggtcgagtagtatcacaaggtcctggtgattctcactaggagaaacatggcctcgtggattaggtgtcgtgggaagaggtggagaggttgaaggagtggggtaaaaggcaggaaaagatggggacatcgatacgtaaaatcgctgggaaagacaaccccgatgtctgtacaaaaggtgaaaacgctcgtaactccagacccatatgcgcggcgcaactccgtgccaaaaggcaaataaaacaagcggaacaagaacaacagacgtgattagctttcatggcttcttcttaacgtggctgctccccgtttcaggtgggagctcgtcaccatcgatgatacgccacagacggcgcggtgagaagttgttgccaaacaggtaaattccgacgagccaggctgcgaggagattggcgaggtggtggagaagatacgcatatgagacgccatagattgctgagtagatagcgatggcgaagaagatcattgaggtgacgtgtctgaacctatagcggagatggatatgttagttggaacttgtgagatgtaacactctagagtctacatacctggtcgtgatgcgcggtatcatagcgccgctggtcatggtctcgacgagaaggaggaagggcataatagataaaacgttgtggtgggatgagaacggcataaaccagtgcacgacaagattgtgggcccagaccaggaggaccagcacgttaattggcagaatccacaacatcaagattaagatggagtgtgcatagttgtcgaagttcaggtgcgaggtggatctggtttctttggcgtgccattgtgcccgcacacatgtggctagctgcacaatgcaggcgaccatataggcaaactggtaggggatgacggtcgagacaaggatcaaaaggatgacggtgtggatgatgcgtcgtcgaggagtgggagtgtggaagataggcaggtttccccggtcctctcgccggatgtagcctgacttgctgtgtacgaccccataaccccaggagaagatgttcacgagggcaagggcgagatagttaacaaggacacatacaccaacgctaatgaggccgaataccgggactaagaaccagaagaaagcgtcttgtgagccaagcaataggtcattcttggtgaagtcgatgggagtctcggtcgagttggaccgccaatggagggtttcgtcggtctggggcagggctttggacgtagccagagaggtggccagtagagacatagctaccagcaggagcgggaaggaagaccgcaacgcacgatcaaggccctcggtgaagggaataaagtaaccagactcatcgtagacctggaactgcttccggagaacgagggcaacgacgagcagtgggaaagccgcgaatatggtccgatacagcatcactagctcaccaagactgctggtgagatcaacttggagggagatgtcgaccgtcgagtcagaggttggatccgtccacaggtgaaatgatacgcccccgagagcggcctgctcactaattgcaggcggcatgtacggcgccacaccgtgcaggttcacgttgacctcattgacattgacgaaaaacttcgactcatgagggtcagagacggattgacggagcaagggagcgaacagttcctccttttgaggatggcgagtgatcttcaaccggtagtcgagcagactcgaatacaatgccgggatcttaacctccatgagcattggtcggttggcgggtagccgcatctttaggccagcactgagcagccctcccaacccaaccttagcccgaatcattgcatccgagctgtccgaaaactcggcgataaggaagcctggagttggtacattggctttgtctacgacagccacaaactgatgttctgcgagcgcctccaagtcgtattggagatacgaaaatggtggggtacgatcgtaagcatgtttagatgagcgggtcgaggcaggcaaatgaatactgtcctcagccgcgctcttgcaggccaaacgggttgatcccacagtgccaccagagaaatctaaattcaagggaaagttggttgaacggccattggatagcgggaacacgctgcagaataggacctcaatattgccattcttatcaagcgattggtccgtgagcagggtgaactttttaccagagacgccctgcggaggaatcggtaaaagacgaacatcggggccatgctgtaggcccagttcacgcaggatcagccgctggccctgcgcaagaatcgtgtttgcgttatcctcaagtgtcagaagtgtatttgcctccttctggggcagtgtacgctcggccactggctccagacccgtcaagtaccaccgcttgagcacacgcatccgttctgcgcgtggtttcgtttgagtagggcgtcgggcatcgacgatctcaaacaaggatttaatgatggtcttgcggaactggtcgcaccaagtaatcgacagatgatccatgccaatccagacatccggaatagaagaggtgaatacggtaaatccgtgggtctcgggaacgagagaggagatactggcgtagtcggagggcaccacggtgtcacgcgcaccacccgcgatggagatgagagtgacatgccagagtgggttattgttcgcccaagtctgcgcataggcgtcgcgccaatagtcgttgatttgtttataggtgtggacgatatcggaatcgaaggaaacaggcggtttcgcatgaggtgcagacatggtgatgatcgtattgaccgaattggcttgatagttcgccatggtcaaagcagtgcgagccactattccccccatagagtgtccaacaaggattactgcgctgggatccggtaacccggggtctcggcgggtgcgtcgcggatcatggtaaagtgacaggatgtatgagatcgcctcgttcacgtattccgcttgatccaacagtgtttgtccatggaacgccgccatatcttcgttgaagtccaccatgaaaaagtccaagctccgcgttccggccgcatggcggctctcgtcgtgtcggaccacatcgtagtaatgtcgcgaggcctcggcggccagagatcggacttggcggtagcttccagcgttcccgggcagaaacagaactgggacaccgttcaactaaacacagagtcagtaagaatccaagcgcatgcaccgagtccgggtcgccgtaccccgatgttatcctgggtgtaaggatccacgccttcttcccgatagacgaagagattgtatttgcttgcaaagcgggtatgttccgtgtcaaactccaacatacgaatgaacgtcgggctcatcatcggaacaccgcaaccgtctccgccatgttgccgaccggtgaacgagccgacgatgcagactaagatcgcgacagcagcgcaagtggtgaaggccgtcaggatggagcaagaccatggactgcgttggcgagattgtcgcgcacggcggccgccggaaggggggacttccatcggaagtcgcggggagcccaatggcatcgatttggtatcgttggagggttggaaggacggggtgcgccacatactcgagttccgggagcgcggtgtcgcgctgccctcgcggcgaaggtcaaagctggtgccgcgctgagctatctgagatcgggttttctcgtcgatggcgtttccatcgtctgttcgggagaccgaggaatcttcgtcctcgacaggggagcccgacgagcgtctgtgcattggagaaggtggagccgggacttcatccagcacacacagacaggttcttggcgcagggggttaaacctcgcaagagaacccttaacgagtaaggaacgaggggaggggaaggggtgggaatggggaaagacaagaatggaagccggggcggttggaggtttgtctggggtcttggcggagaaaaggtgtctgtccctgacagtccgtgtcaagtccctgaaagtggtcttttttgtgggtacacgtgtaaagtgtttatggactttagcagaggttcttctaatctttgatctcttacgatcttgacttaagatattcaccgatgctcgtttctttttttttccgacgcaattggcaatgtaggcttggcactacatagccctagtttgttaatatgaagcaagcctatgttgaggatggcctacaaataatatactattttatagctaatataaacagaatcggatcaagacataaggaaagctcaaggtcatatgtatagatgcgctgagccaccacggcaggcaatcgtgtatcccctcataatgttcctgcaggacgcgtatgccacaatagtaagactggccaagtgcttattaccatcacaaatagtatctccgttagatattagggatcgcatactatccttgtacaaccttgaaacatttgaaaccagctggatgttccggtctacccgtggacccctagatatgtagacgactctagttatgttgtattaactattaggagcaatgacgtgacagactctggcaaggctattaccacggagtagtatagcatcacagcgctatagaacaactagcatccaattgatttataattagctctctttttatctcagttgattttgtttgtattctcatttaaaacaattccaatctcagctggatatagtgtacaagtgcggggtgtagaattcctgtactataaagagcctctcctaagtctcacgctcactgtgtatttgctctttgtaggatcatcactattatctagtataggctggtactacgtgatttctttgtgctccactgttacacttaaggaaattaagataccccttaaccctaagactggcctgtgcaccagaatgagcattgtacattaagcagattcagatctttgacacgacggaacatctactagtacttaccaaggccattgggtgacacccgctaaccttctactcatagagcaacgaggatacacgagagcgaagggtactaccgaggttaatacacaacacaaagcgaatccgtgaaagccaattcattgtcctatccgattatcccattttaatgtcccttccacattctcccaaacaaaaatcccaggtcattgaaaggtccagaaatacaaagcaatcatcagtcattgcgcgagcgtcaggtatcacagtagcctggtagtctacggcacaatagtagtcgtagccttctcaggatcttccccgaagtcctccttgggattgagaccacggtgagcagcaacctcctggaggtccgcatcatgctcagcatcgaagttacgacccaaacgctctggtccagcaattgtaatcagaataacataggcaaagacgcagcccatgaagatgcaaatgaccttgccgtactcgtagcgatgggcggcttcttcagtagggggcaacgggaagcgttcaccgatggttgattcaatagtcgagctagcggaggagaccaagttgccgagctggtaggcggtgccgacagcgaaggtgcggatagatcctggtgatagctccataagatggatagggatcacaccccatgcaccctggaccatgaactgctcgaagtaggccgcagcaatgacattcttgttctggacaaatgtgtaggggtagagaagggcaccgccgatgatggagatggcgatgatagagaaccggcggccgaagatctgactggcccagccgcataatacaccacctgacaaggcgcctaggttggcgacaacttgtgtcacggtgactgcgttctttgagaatttgaactggttctccagcattgtcgggtaaagatcctgagatccgtgcgactaatttccatgttagcttcttctgttactcgaatagcaagtaatacataccatgaaattaaacccagacataagcagaaccaggtatatgagtatcaaccagtgtcgctgtagtgcgaccttcccttctgagatgaacgatgccgcaacacctccacgcaattcctgtcgcgcttcctggcgccgacggaaagtctcagtttcaccaaggaataaccggaagatgatgatcaagactggtggaccagcggcaaaccagaacagcggccgccagccttcaggggtagtatcgactagacctcgagcgaaagccgtggctagcagatatccaaaggcgtaaccttgctgcaagagtcccgagataataccgcgggcttcaggcgggcaatcctccagcgcggtggcagccgcattaccgtacaagccacccatggcaattccaaacaaggcgcgacaagccaggaactgtttataagtctgacagaaaccagcaccaagctcgaggacgacgaagagcaactggttgacgatgaacggccatttgcggccccatcgatcggaggcgattccgaaggtgatggcgccgacagatcgcagcatcagaaccagggtgatttcccatgtgatatcggtgacggatttatcgaatgatttcgccagtgcagaggcagtaagcgagacggtgaagaagtcaaacgaatcccaggaccagccaagaaacgcgacctatagggttaggctagttagtcaaggacgtttcctacctgttagccttatggggaggaggacataccgagaaattcagccactgagaccggttgagcagtgtaagagccttgaacgggttcggcgccgggttcatgggaggcactagagaggagatacgagtggcgatgtagcggccaacactcatatcctcctcgaaatctggcgaggatgtcgccgcatactgagtctttccctcatccatgactgctaaggatcttggagcaccgatgaatcggagagtaaaagccggatcctggcacaaagtccgaatgaagagggataagagaggtcacaagtcagccaggggggtcctgggccgctctaaatacggcggggaaccctcctctcctctctgctcaccgaatttagcgggcatcccgaggaccgaaaggaatcaaacaaatgaccaccgacgtctgcgggcccgctgtatacagggatgatacgttatcttattcgcttgccacgcgggtcagcaacctggaattcggagacgcgcacgaatgagggcaatctaagccgatcatagtacaattacggggtatgacccagacaacgagagtccccatggggagaagctagaaaagtctgcgatgcaaaatgacttaatggcatgatttttctatattgtccagtggatacagcttgatgccaggcactaagcccacagtctttttccgtgaattctttagtggcattctttgtcttttttatctagacctttctataattgtttcgtaaacttttctgagaactttgcaatctcttccggtatgtgctttgattcggatgactacatctaccagtcacataggtacgaaagtacgcttactttgatgttagtgtcttacccaagaacatatcccggattatccacgcggggtgtggagttgaaaaatggaggggaaaaatggggaaatccccccacaaaaatagcttttctccttgaacttccttgcaagccactgaagccaggccggccgtaggtcggtctcggggtttaatcggctgttataagtattgtcaccggtcttgtgtgctaaactaaggtagaacattctggactttgttctttttttggggaagagacacttactacatagctgctcacgatatagtgcagtaatccatcctcccacactctcagattgtcctttcaatgattcagcccaaggttacttggcagggcttctctgaagtaagactttgcccaggtccatgggtggatagtagactgccaagaattacaggggacaatgcgttggccacatggtcggcttctccccgaacatcccaagtacggggtacggggtactcgatacggaggatacagaagagtgccttctaggcgtactttgggcatggcagtatcacactcggcatcgcgaactgtctagacttactacaagatccgagatctcagccggttcttgcctatagtgccgataaatgccatgctattggcgagaaagctttttatcaccgcgctcggactcggacgcttggattaccctgcatgtgaataaattgggctgaatccttcgcctttacttggccaaggtccccagttttttttctttcggaaattatactccgtatacccatattccgtaggaatttccacttctcggaaatacaagcctgaatgggcaagccgttgatagatacgccgcgtcgcggcggttgtcgatctttaatttattataaaccgaggctggggaagtttcgccgcagataacgttgtgcggtttcctcttgtcttagactggggaggctctttgtgcgagtaaggaaccttggaaggttccaaggttcaatgtttcaacgttagcctagtaatttagtcctgacttggttccatggtagcatatttgctgtcttacagtatacgatatgaaagaagttctcaaacgagcaagtagggagacgcatctagattcgttaaatgctctcgcctccatcttaataggcattctcattgtcatcatcttttgggaaacaggaaacaccgactatatgataatgctggattggattgtaacagctgctccgaagaatttggatagcttgcacggaaagtaagttcttagggctaaaaatcaccgccttggctgtcaattgtgttttctcttcactcgtacgcaggttgttctacggagagatactaggtagagaacgcgtgtaatagttattgaggattatatttacaaaaatagtcggccgggtttgcggcctctttccttagttggctcgatggctgtccttttttcctacttatattctcccccttcgtgggtttttttttagctgaacggcagaaaaagattgatttgtgagctcgatctttctatatctaactagccctggattatggaaaaaatattgagcttagtctcaaacttttaatgcgaaatcagctagccacttgggttggaatcattcataggaaataatacagctcattaccaggaggccataacaaaaacatccgttcttgttaaggcccagagggaccatatcatagactgacactatgctttcgagcctaccttttttactaaaacaccataagcatagttgggcttacaagctcatgaatgacccagaaagctagttcacattcaggagctcaatacgcattttggattgggatagcatcagtggaaggactcatgtccctgtaatggatgctgaagttatagtgctgcagcctgctctattagaagacctgaccgaaatcttcggactcaccaagtaccatcggcttgactgtactcggcaggtctaagtacctagctcctccctatgctgtttgaagaccaagttgtttgattattgttccaatattgagccgataatatcgccgaacactacgcagttaacacatcaagacagtgcacttttggatcagcatggatgtcgtcgagtttggaggacatgatgaaagtatagtgaacttgatatactactaccggatcattgccactcaagtctctctgatttataaataggtatctaccaaatcagggatgctccttggttccctgtcaactgcggcccgacagtcttggcattgactggcttccagtggcttggacatgtcaaatgccaaatattgtgtaggcccacaatgaaatactagatcaagacatactcattggctatccaattcagctgaagaaaggctaagccacattctaagatgacaaggaagctgcgtcgatctgaaaccctcctgaggcggtgctcaacgctcagccccgcgagccccgccaatgccgtgtatttattgtcaggtcattcccagatctcaccttcctatccagttctcccaagtataactatacctatatatcatccgaccaaacatctacctaagaaccaattcttatttcctcgatatcaacatgtcgtacggtggaccctcgcagaatcaatacggtggtggtgccggttactatgaccagcaaggccaaggataccctcctcagcagggctattcccatcaaccacagcaaggatattacccaccagaggtgagtctacacacacgatataccgttgcacagaaccgtgtcacacagcgctcaaaccctcactctccactcgtactcgtaccgcgagcatacataactaactttccgcgctacagggtcagcaggcttatggtcagccccagtacggccaacattcaggtccttatgaccaacaaggcgggcagggctaccctccacagcaccagcaaggccagtatcctgcccaaggcagtcctggatacggtcagcctccccagcaacagcactacccgcaaagtggtggcggtgagagctcctcatactacggtggcgcacccccgcaccaggaaggacagcccggtgctgtaggaccggagggagaaaggggtctcgggtcgacactgcttggcggcgcggctggcgggttcgtgggcaataagcttggccacggcctacttggtactgcgggcggtgctgttttgggtgctgttggtatgaatatggcaactaataagctgtgagtgtccttcttatcattatatcttgtttgttgtcttttggatcgagactgactgttgatactctggtatagtgagaagaagcacaagaaggagaagaaagacaagaagcataagaaggataagaagcacaagcggaagagctcatcgagcagctctagctccagctcgtcctctgacagcgactaattggtctcttttttttgggtctgattggtcaccatgacttgttttatcctttacattttgtataccctgtcttgttctctgctgctttttccgttccggtaggttcgttttggcttctcgtcttggggactggagaacctgtatgcgttacgtttatcatatgcatttgtattctcaatgacatgacagctcatcaacaaagttgaattattaaatcaagcgattatgcctttattgctgacatatatgggaatgcttgttagctgcatttctgcccgacagatagccctttgtttcagttcgcagagcagttgaacattgtaatgactatggccatgagtggcatccagatcgtatgttattaaattggttaatattttgttattgaaagtcgccgcgcttcagcttcgccctagccggaaaactctttgaaaaaagcctctgggtcgatgctactgtccagatcgaacgacagccgggggacttcctttggtgaatcccacaaaaagcgccacttctgtgatatcggattccagtactgtcggggtacaagagcagacagacgtctccattgacgacgcataagcctgattgtaattgtatgtggtcgaccattggcatattcggcaaaagtggtacctttctcaggtcccctggccagcaacctgaagagctcgccaccagactcggtctggaaaacctggggctttgaatttctccttttgacaggctcccacggcacagttcccgatatgagtccctcgagcgtctggagatccttctctggcaatggcggaaggagactgttcaatgtgttgttgtaccattttttccgaatatttttcttccgacactgggccaattctctgccccagctgtcctccttaggaattggaggttgaaattgtttgattaacggcctgatacggactgctgtaaccactgggttctgcatttgagagattgcgagattcttcacgatagccgggggttcccagccatcactgaaatcaacaggctgggatattagctctttaagagccatggagtcattggggatttgcggcgttagaatttttgccagcagctcatgtcgccgtctcccagtgcgaccgtatgacagtaacagcaccttctcgagaggacgtgcatagccctcatttgctcgccgcagaaccgacaacgcatttcttgccgcatgaaccgcctgaggaccagccttcggggaacgagaggagacagcacgatatcgggagatgatatggtctttcatgtagttgcgagcgatggggtcaggtaggtaggtacattcgcgcagcgtggcgcgaaacaaatggcgccattggtgtggttttgagagattctgtacccaatgctgagattgcggtccggccattaggaatagcttatctgattgcaagaagtgcaaagaaaaagaaccccaaaacggaggaacgcgaaatccttggcgaaatgcgtgtcacgggaactccgacgcgccattttcgccgtctctcccccaaaccccgcgaacattgccttgccttgcattgagcctcatatcttaatactagttcaatttttactttgacacttcgcttcgttcggtcgctttctggctttgaatgttatttggtctggcctacggtttcccttcagagggttagccacgcgcctccttgagctcgcgtcattccaatcggcatccggtatctctccccttgctatgtactttaccccatcattacccgatttgtaggctgatattccctaaaaagcccagcatgtcgtactcacagggcagtacagggtcgaatggaatggcctacaacatgttgaatggttcccaatccctctcctccacccctcgcgcaactcctccgcccccgaaaggatctcagatgtcctctttcggttactccaacggaatctcacgaagctttggtggatatgatggaaccaatgagtatggttcggtaatgtcataccaggaggagtataaaccacagatttaccgagttcgtggtctatatccacacccacagagcatgccactgacgaggctcaaaaataggctgtctattctaatgttgctgtctatgaaatggaagtgaatggagttgctgtgatgaaacgtcggtccgattcttggttgaacgctacgcaaattttaaaagtcgctggtgttgtgaaagcgagacgaacgaaaaccctcgagaaagaaattgcggctggtgaacacgagaaagtacaaggcggttacggaaaataccaggggacgtgggtcaactaccaacgaggcgtcgacctctgcaaagagtaccacgttgaagaagcactccggccactgctcgagtacgatatgagccccgacggctccggagctcctgcgcacggatcaacgatagatacacccacgaaagagcaagcaatggccgcgcagcgcaagcgcttgtacaacggcggggataatcgcagcgcgtcgcagccgcagcagggaaccttcttccaaaacatctcgcgaaccgccgccaccgctgtcaatgccctcagcaaagcgcgcttcgactcgcccagctctaatagtcgtcggcccagcatggcgcgcaagccctcacagcagatgagcagccaggaatccgggcttgcattcagcagccagcagaccatgtacatgtccgacagcgggtttggcagcttgcaaaatcggtaccaggtgcaggatgacaacgaggatcttgcggaacctcctcgaaaacgcatgcgctctacttcacaccaaggcccccctattggtctcacccgagaaccatctaatctatctatgctcgaacctacaccaacagaacctaacgactcattctatcaacaagtggatcttcctccccctcctattgatgatggctcgaaacgcggcattgagtccttggcgcctgcttctactcccgagagattccagaagatgaagctcattatgacattgttccttgataaacgaacaaaagactttacgaatcacccggctttgttggagttgaccggggatgatcttgagattccccttgatgagtaccgaaacaatgccctacactgggctgcgatgcttgcccgcatgccactgcttaatgctttagtagccaagggtgtcagtatagcgcgagtcaatggtgccggagaaaccgccctacaaaaggccgtgggcaccaggaacaacctcgattatcgaagcttcccacgtttgctccaggtattagcccctaccattgacatggtcgattacagcggacgtaccgtcctgcaccatatcgccatgatggctgcgactggtggcggcggacatgtctccgcaaagcattacctggaagctctgcttgagttcactgtacgacatggcggtatcgccccaagtgcgaatggagatcatgccacaaacgggatccccggcggtgaagtcatgtctctaggacgattcatctctgaaattgttaacctccgcgatgatcagggcgatacggccctcaatctggcagggcgtgcgcgctcagtccttgtcccgcaactcctagaagtgggcgccgatcctcatattccaaaccatactggcctccgccctgcagattacggtgttggtgttgacatggtcgacggaaactctcaatctcaacaaccggctaatcggaatgactcatttattgatcaattggcgaaatcgaagaaagagatacttgatggtaaatatcttctcgcattaatcttcatccttactaacctgaaatacagcggcaatgtcccaaattagcgcactggtcgaagaaacacttgggggaattgaccgcgagttggcttcgagcttgacacaaaaacaagaaactttcgatcactggcatacgaagatccgcgagtctgcgaaggctcggcagatcgaacagaaacaatacgatgagctcaaacgcaggagttctgagcgcgtagagctagaccgacgtatcaagaatctggagcggtcatctgaggggctgttggtcacagtgaacaatacaccaggattggacgcgaccaagacggctgttatcggtgatgcagaccgagattccggtgttgatgtcgcgacatttgatgtcctattccctgagggtttcgacccagcttccggcttctcggaacagcaactctccttcctggctacactgccagcaacagatctgcttaggcgccagacacaatgctacaaagaattcaacggagagattctagctgaagtcgattgtctgaaagcaaagaacgcagttcttggccagaactaccgtcgcatggtgatggcatgcacgggctggacggcggaacaagtagatgacgccgcagagggcctcacgcaatgcgtcaaggaactgaatgacaatcccgtccccgaggacgaagctattgagattctgatgcgggatcgcgggcaggactggtagtttaaactgatgtgttgcattattctctgagcgtttaggcggcgttgcttcacttgtctacaaataccctgttggaatacatccatgcccgttggcacatgtcttgttatttacgagaaatgcaattcttgcacatttattcgtcttggctgtgtgtacgtgtaggctaaatgttgcaatattagccggtcgagttggctgctaggctaggtggcttgagaagcccatgttggttgccgagacatttagcccatccccgcgtttcacttgcttgcactttcggataaatagcctgctgcggataagtacttatagtcatgtgtagcacttccctattcatcattacaggcatcgttgtgcttttgacaattgccattacactattgagtacggagtactgaatcaagaatatggctaccagcttccttcacgtgaagggtgatattattgttgacggaaatggaaaggcagttgtgatgcgaggagctgctcttggagggtggatgaagtatgcaaatgatcggattgccgtatcattcccctgtcctcaaactgacatcccatcttagtatggagaatttcatcacaggcttctcaggccacgaagcccagcaccgcgccgccatgcgccgagtcctgggacaacagagatatgaatacttcttcgacaaatggctggagtacttcttcaccgaagcggatgccaaattcttcgccgagttagggttgaactgtctgcgtctgcctttcaactaccgccactttgaagacgatatgaatccccgcgtgctaaaggaatcagggttcaaacatttggaccgagtcgtcgatctggtcggtgtttcacatattcatctgcatgggggtagcgactaatctcgatagccttatagtgcgcagcccacgggatctataccatcctggatatgcacgctgtccccggtggtcagaacccagactggcattctgacaatcctaccggctatgctgctttctgggattacaaagaccaccaagaccggactgtttggctctgggagcagattgccgccaggtacagagataatccttgggttgctgggtacaacccgctcaatgaaccttgcgatcctgagcatgtacgactacccgcattctatgctcgtgttgaaaaggcaattcgcaatatcgatccgaatcatataatgtggctggatggtaatacgtttgcgatggaatggaaggggtttgacgaggtgctgccgaactgcgtgtatgccatgcatgattactcagtgagcttcacattcctttcgaggtcgtgagataagggcgttcttgttctaatacgatataatctctagtcaatgggcttccctaccggcgatcgctacaaaggcacaaatgaacaaaaagaacgccttgaacaggggtacctgcgcaaagcgcgattcatgagcgagaacaagacccccgtctggaatggggagttcggacccgtctacgcagatcatatttttgacttcgatgccgagactgttaatcaggagcgatacaacctccttggtgaccagctgcgcatctacgacaagtataacatcagttggtcgatctggctctacaaggacattggtctgcagggtatgatctacacgaatcctgcgagcaagtggaacaagacactcaagccttttctggacaagaagagagacttctggctggataaatggggccgtcggcctaagtctgagcccgaggcggctttgaagcctttgctcgagtggattgaccgcgttagtccaactgcgaaggaaacttatcccacgtcgtggaatacggagttgcatgtcatgcgcaatgtgttttacactttcttagcggcttcgtttgtggatgagtttgctgaattgtttcgaggaagcagtgagaaggatctggaagaactggccaggagtttccactttgagagttgtatacagcgagagggtttgaatcgcatactcaaggatcacgcacatgggtctcattgattctgagcaagagtcagcttggtatagcatactataataaattggactttcacgactgattctagtggcctagagcctggagggaggtggtgctctataagcagagtgtggcaatagtatccgttcccggcgatattccggcttctacttaaataccacgcactattgttatccacacactatcgataagccagaaaaatcgaaaaagaccgcggggcacattctcgacttcgaggtctttaaaggttactagagagatttgacatggctgaatctcctgcgtatccgtccaatctggacagcatatacgatgccgcatcatctctcaaagaccgcatcgatccaatccgattgacgtcagacaacattgtcccgatcctcaacctgcccctcactcacaaggtgctgggccacgacgcttcagaagagtcccttgcacaggttgcaagcggcgagatctcctataccaccttcgtcgccgatcaggcccgcgccgccctccggtctagcgatgacttgactacggaacaaaaacaatcgcaacttctgcatcttggactagcagccttgttcagctttctacagtccaacgttaccggtcctcccctcgaattcagctcggctgaagctgtgcttccctccagtctgcgaacagaacggacaaccctcaaagccgtgcgggcaaagatcatccgcgatctaacactggatggagaagctgcctacaagctcacacctaacccggaattgttcgctgtggctaaggctctgctagccgatgcgagtagcgatggaccacttgtggcaaagaccgcacgtatgcgcaccaactttcttcaccaaaaaatgctttcggaggtcacgagtacactccaggatgtgatctacaaggatgttgagatcctggacaaggctgagttgacctcagatgagagaagtcggttcctgctggaaagggccattattcatacacaccatggattcgatgccaaggcacgggaagatattactcaggcggccaaggtgcggaggttcgaatttgcgctgaccggaaagatgggcaagcgtacaaagttccaagaccgtgatatcagtcaactggtcgtgttggctaagagtgccgatgagacatcaccatcacaatcttcggagccttctgggcctaagaacctgaacttggacgacgacacccttctcgaggcaatatctttctccgaccaaaagcccgacgaacaatccttggcaattcaggataaggtttctccagctttggatgctattgatgccaacaatcagcctattctcaaccccgttgactctgctcttctactcgcactggcatctgccattactaatacctcgcctgagaatggtctcacccgagaggaaacaaacccctacgccattcgagtgcttgatggtggtagctccaactggcagatctatacccaagcacttttggtccgcagtcgagtagagggctaccgttcccgtactgttgagagagccgtgctgcagatgcaggctttggtggaccaggtcattgcggataccgcaaccagcgacgacgcagctcagaatgaatcaggcgaccctacaactttcctgccgcgccctgagcagtctgagtctgccccggccgctgacagacttgagcacatctggatcctagacttctcaacaagatggagtctcgaggctgagcttgcgaagcgctgggttgatcttggtggtctacgcaccgcacttgagatctacgagagactacaaatgtgggccgaggccgcgctttgctatgctgccaccgagcgcgagggcaaggcgaagaaactcatccgccgccagctttaccaggccaccggcccagatgaaaatgacgaaaatgaacaattcgaaggaccagagcggtcaccactaccagcagatgccccacgcttgctctgtatcatgggagatatcgacaaggacgaaaagatgtacgagcgcgcctgggaagtctccggggaacgatacgcccgcgcccagcggtccctggcccgccattatctcacctccacaccaccggaattggaaaaggccgagatagcctataagaagagtttgcacatcaaccgcctgaaccacggtgcatggttcgctctcggctgcgtgcagctcgagctccagaaatgggcagaagcaaccgacacctttacccgcaccgtccaactggacgataccgacggccaggcatggagtaaccttgccgccgcgatgctgcgcatgcccgactcggagcccgccccagagattatcgacaaggccactggcgaagtctccgccgccgaagtcgacccctacaagcgcaagcgcgaggctctatcggcactccagcgcgcagcgcaactaaagggcactgacgcccgcatttgggacaacgtcctgacagtcgcagcatctatcccgcccccggcaacaccattccgcgatgtgattaccgcgcagaagcgcattatcgagctcgtcggcacaaagcagggcgaaaagtgcattgatgtggcgatcctgagcatgctcgttgacttcctgaacgtggcgttcgagtacgaggcattgcttatccgctctgacgatccatctgaagccccgattgttcgcaccggtactattcccggccagatcatctcgctgatcgatcagaatgttgtcccgcttatcacacactctgcggttctgtggcagattgttgctcgcgtcgaagtcttccgtcatcggccgtctaaggcgttcgaagctcacgagaaggcgtggcgtgctgctgttgctgctaatgctcaaggtgctttccagatgggtgatgagaagccctggcttgagattgtgcgggctacagagaaacttgtgagggatgggtatgctaagtttggtcctatggaccgtgaagatcagaagattgagggtgaccatgagcctgagcttgttgcgaaggactggcggttcaaggctcgaagtgccgtaagaggaatcttgggcaagggcaaagaattctgggatggcacggaaggctgggaccgcttgaagcagttgcagtctgaggttaccgccaattagtacatatatcccttgatgctgtttatgaatgatatagattagctcgctcatatggcaggtgcaatgcttacaaaagtcatataccaagttcaacattattcaaattccctcatcttgattgataaatcaaggctattcatagtcacagctagagtcataatcttagggaatcattttgattccaactttctcttcaccatcccgcaaaagctctcgaacaagacagtgtctgtcccctgggcccagcgaactaaaaccttcacctctctctcgtccggtttctgtccccggaccaaccgtatctgcagacgtacccccagcgccacctggtccggaatcgccttaaatttagccgcaccctcctcgccggcaagtttcattttccgacgtgcgaatctcgaccatacattctcagaagcgaatcccgtcccggcagaacgtgtttgattccaggtccagaaccaaggcaacgaactgagttctgtatctatagtcgcagttgcagtgtcaatagacgtgccaggtggtagagtgaatgtgtaatctgcagggaaaggcaaaagactcttcgggcagcccgggattccgcgcacaatattctagaccagcggttagacatggcgcacaaagcacagacgtgaacgaagtgagttagaggtagtaaagtaggacttaccatggcaggccttcggtctcccaatgaccacgccacggcccagcgcttcgtcttgcttccctgctcgaactcggtgacggcgaaattggtgattccatgcttgatcagcatctctacgagtacgttgatactgctcaatttgccgagcatggatgtgtaccactggatgcggtcacgcagctggagactctcgtcgatcatttgcttcacgaaagccacttctcctccgtgagtcaccatttcaacttccgcgccggtgcaggtcttcatgtaagttagaacggtatggtacgtaagtggaatgtggtggatggtatatggctatttcgtgttggaagtgaagcagtaacactcaccgaaaatgggtctcgttctttctgctcagcagactgcttcagctcattaggcgaggcataaaagggtgggttgcacatggtaaagtcaaggctggttaatggtcaggtaatattctagcaagtcttaactggagggagactcacgtttggtgacctagcttttctaacgggaataggggtccgttggggtcagaatttacaatctgaattcgtgatctaagattgttcagagccacattatgctgggaggtgcggatattgttcgagtcgatgtctggttggtcagtggatgccgaatatcttcgggctgaaggacatacctgttgctacaaatttccaccgcggccgtgtcgcgcagcccagaagtgggtagatagcgatgcatcccgttccgcttgattttgtcagacatgatccagagactggagggactcattacttacatatcgagcccgacgacctcccggtcccggtcatactcctcatgcagtcctccggcggtggagtcaaggaggtcatgtagccagaggatgtagttgagtctatgctacatgtcagacatatgcgtataggatctaagccgtcattcgggatgacatacctatttggtacctaaaattaagtcaacacgtgtccgtcagaatatttttagtatctgcataccggtggacacagtcgatcctcagggatctcaactttcaggtcaaaatcttgttgcaggagggtggtggtgagttgtctgcatgatgcaaatcagatccactcccgaagttagacgttagagtcctccaacttaccggacggccgctggatcagtaaagtcaagttgtccgtttggtttcaagctgtattcgattagcacttgtctttctgttagaacagaggccttttcacgtactgcttggcgaagtcgcgcgattgcagccccaaggctgcaaaatcgacgtcatttttgtagaggcttcggacagactccatgctatttcgtggagtttctcagtttacttgatattatcgaaagaactggaatgtggccggtgaaaagcaaagcaaagtccacggcgcatagggaggccggtgttggcaagcgggtagagaaggcgaaagcggccatctgaaactttgaccgcgttgatgtattaggcagaaaaccatatagaacatataactatgacctacgccaatacatgtaggttccagactacataattgatctcaggaagaaactgatatagcaaccagtagtgacagaggtttaaaataaagaaatagcagggtctatggaagatatatggataccaattaagaaggcggaggggaacgcggtaggttgaaacgcaagttccgggtggctgctatcgtcgagcctcaccttacgtcacccttatacgggcatataacctcaagaaaattaaagatgccgaagtgagatgctacccagatgtagtagtatttgccattttgtaaagacgtgtatgaaataaaaataaaaataaataatcgccaaaagtatgagtgagaagtgaaaccatgtaagcaccgctttttactaccccaaatcgtcaagtcgtgataggcccaattatatacctttcccccttctattcacaatttccccccatttttccattccagatatatcgatcgttttcatttagacggagctttccttcttcaaaaggcgctcttggcgctcaagacgccatccatagccccacttcatctcaaccatgagaagagggaccgtggcgaggataatgccagcgagcatgacaaatgcaaactgggcagtgagagcatcaatgatagcctgagaagccgcgacaccagcagcaccaatgaagcatctcatcaggttgttgactgccgttgcactagcactagcaccggggtacaagtcgatgacgagtgtgctgttaatggtgaagatagcggtggagccataggcaatgaggaattgtaggataattgggactgcaaggtgtgtgcggagggatactccgtagacggcgacacagacaatgaagatagccgtgatccaccaagtgttgcgcatgcgggcatactcgatggggaaatcggggtagctctttaagctgatgcgagtatcgatcggaaggttgtgttgctgacaatattcacgttccgttcgcttgtgattgtagtccatcaggtatccgattgtatacgagccggccatgcatccaaaaccattgccgaggaaggtcaggccaacttccattgagttcaggccatattgtttttcgaataggtccgatgtggaggatgtcaccattgaccacactgtgtacacaatgctgccgaagagaagggtgatgaagacatccttctcgcatagaaaggcgaggggtgctagcacggtctttaaggtcaccttacccttctttccgcaggggattgaaccttcctggacgtctttctgtccgcaaatggagtagatgactggcttgtggatgcctttgaggggaactgtgccgtttccagcgatagagcggagtgtttcggggaggaaaaacatgatagacaaaagactgattccggatgcaataaccaagaaccagaagatagatcgaaacccaaggtattgagagaggattccaccgaatactggtccaactccttgtcccaacatgcgaactagatactgttagctcagaacatagcagtgtatccaagcagcaggctacttaccaccaccaaatattccaatcaagctgcctcgttccgctgaggtggtaatatcaccaatgacacccgcacctaggaaagttagctaagacacaagacagggatgattaatgtatcataccaattgagatggtggctgcacttccggcagcttgcagcgctcggaaagccataagttcaccatagttggtagagacagccaaagcaatgttcgaaataatgtatacactaaatgttccaacaaaaatcacacgacggcccaatgcatcagagaaagaaccccagaagctcggggcaagaccttgaacaatcatgtatatcgtgatagtcaaggtagctagagacatggagatatcgagttcctatattgccgtcaacaagtggccaaatccatagtgctcaagttgaccaacctttgcaacttctgacagtgcagggaaatagatgtttgaagatagcggcgagaaaatggcggcgaaagagacaataataaccattaacaatttgcgagaccgagtgaacacatgatatggtggttcttctggggcttgggcttcaagattgattgactctgctggtgtcgatgataccgagaatcctttctcatattcaggcgagagattagggcttgagttgaccgactggtctgtaacctcaggatccctgagggtttctgctgaactgtagtgggacaaagtcatggtgaataattattatagaatatgaagacaacactggctgttatcaacagatgcaaatcattgagaatagaatataaagtatggcttcattcggctcacagttttagaggtatagaaagctaaatgatagaatggagacatccttttgtatctcaattccagcaggaaacccctatagggcatattccaaaatacaaacaatattaggagacccatacatctgagagtcaaccaaatgtactccacagtgggttcgactaggggtcactataccctctccttgatagtagaaaatggcacggataatacttatctggtaaccccaatgtcgctcaatttgatacatacgggccacgatcagcagttgaaatactcgaggttctaatccacgagcttctagaatgacttacaccactagtctagacggctacatgtctattgtatcatctctagtattagaaatatgacttctaccccagggaaatcatatttctgatacttctgggagctacccacgagaggttggggcctggttaactatggataaatagttttaatacctaagttcatagggcagattccagtacccactgggattccttctagactccatatacgcgtaatggaatcgatctgcatataatatgcagcacgcaggtccggtttcactctcaagacttggagtcggaaaaaatatgtcggggaaatgttgcttggcactcgattacttttctcgattcaactccgcagaatctttcgtttcctatgttgtaaaggccccgaaagtgtgcggaattagggaggtgataaactagttaaccaatccactaattgtttccaaagcagcagcggatagatatctcgagtacaggaaaagagaagctgaaacctgatttctgttccagggtctcattttccccacgtgtcgaatattagccattttgataacatatatgtcaagcaaatgccaagcttcatcatttaccctggtcaatattgatacaggtgagattattgggcagaatacgccattgaattacgtgtgcattccccttgaccgatctatataggggatcttaacccttgctgttgacaagtcgtcaatcggggacccacaaagggggcgtctgactacagggcttagcatcacaatccaatgacatgcattatgattccagatatgtgatactgcctacaataccgagtacattacggagtataattcatacagaggccggtcagcttggcgatcatatcctgtctagcgcgaaccttgtcccgagagaaagtcatggacgaacttcttctcctatacatatatatctagcaatgtagctagctgcattggtcagtagcttgccgggtaccatacagtacatagagagtacaatatactaggtactgtgcaagcttttctacatagattatagcttagtctttctatctgactccactgatgcgacacccctagaaatcttagcggaaccgccaagagttcgtcgtcgtctgcggttgatcattgaattgcacatcgcttcgtaattgagcgtcgactttacactttcggggtgtttttttatctgcccaacctccagctcggttaaggctggccagggctatctacccctgtaaggctgatacagcttcccatcttggcagcctgatagaactcaattctttatacctcagttttgatgcccaatgccaagactctggtttcacggcaagaacggtctcctataatctactccgtactccgtaactccttcgctgctgcggatgccgattctcgggtacccgatatggactccgttagtgcacgttagatacatgcagtgtagttagtttcattagtagattggcctgacatggtgcaattccccacttctaaacaatattgggggtccaaaccctcaatgtgattaggttatagcttcattttcaagtctccgagttattgtggtgttgaacgcctcgatttagcatattatctgtcaacgttgtggccccaatgcaagtttttcttctttttcttctagctgtggaatagagaattggatcttaactttcgaattctctcaaggttccttgaacaagaatttctatacactttactttcaaatttgggagatatggtagatccccctgacaggtatgacaatcttcatctgaaacacagtatacggagtaatcatatggatctaacgatactagcggagaaaataaagatgattgttacgaacggatgaggctgtgtctgatctatttgcctggcgcttcaataaacaagcgctttgaccatgggatttgcagatctgatgcagcccctggctttcttggcccgctaaaggaacttgacacacacaagctaactaatataaatgataaaggattccagagtgttccacgaaggttttgaggtgatttaccgcaaaggaaccctagcatgtcgttatcgcatcaaacgacgtcctcggtgtcctccgtcaaactgctcatcattttgtcttctcccgcctaagtgtcctctattaacagcaacgttacaagtgcctctcaaaatgaatgtaatggaccttcttggcatcatgccgggtccagaacaaaagacacctcgtaagtttctttcataccccacagggcagggcccttcagaacgcccctgatcgtcggcgtatggagctcgtgtgtagatctggcgattgagtaagttgttcctatgttgtaactagttagttacatatggatatcttaatttgatagtactgggctgtggaaatgtttgtttcaggataaccacgctatatgatataatgcactacccccccttgtgaaacatgctaccgatattatagaagaccttttaactatttagacagtatctaatggcgttatataatcaccatggtttaaaccgaagaaagtgacctaattgtctatgtttaatagcaagtacacgttgttctaggatagagttatcaactctgcttcggatgaaagagaccacagagacatatccagccagttttggataaaaatatacaagatttcgcaataaccagtggatatatatctcacctaattacggatgccactagtcagtggaagtgtagctataaattaaatattgagatgcgcgagcgaaagttcttgacacggcatgattgtcaaacggtttattatctctatcggatagatatgtcgcacctctaattcttcgacggctggggatagaaaatcaaagcgagacttccattcaccgaagccgtccgcattgttgatcacatttaacgcacagatcaatgtatgcgcacaagtcacgaagtctcgcttcccaaatgaattgatcgtgctgataacaccgtgaacatgcagttgggatccggaaacctttgtaatccattaagagatcaacacgatcgacgaagctttcgcgaacgtggacttgaacatgaaagacgctggaagaaaggccgggagcacgtatatcgggtgaactcgtaccatgtcccgaccaatgacaaggtcctggtgcgaaatttcacgaaatgtatgccaaatcaccagccgatttggacgtgtgttgagtaacgaggctcggctcggatgatcgaagtcgcaactcacgatgcgtgagagatcaaggccggagcggacatggcgtgtggatcatgcagccatctatctcttgtgttgaagtagcgtgggtaggcaatgtcacctaacaatgggagaagaccccatcgcaaatatcgtgatcttagcgcttgtcccctctgccaccaccgcggccaccgcctcggccacctctaccacccccgccgcctctgccgcctcttgttttgccctttcctctcccacccatcatacggcgccctgacgcctggacacgggcgatgtcgtctttgttcaggttcaaagtgcctcctgagaacctgcccacggaggatccggcaagaccccgctctcttcgcccgttgttgctcgatttatgtaccttgttaggcttctcgaggatgatgccgttctccttggcctcttggcggcgtctatcttcctttgattcagccttggctttgatgcctcttcggtgcgcagtgggcattttagtttgcgcatagagcgaagttttggctccgagggattgcatgcgcatatccaaagccttcaaacggttctttccagtgggcgccagatcattggcagagtcaagaaggtgtgactccttaagcagtctctgcaatgcaagatcatgcttgaggtttgcagagtcgtgggcgtcttcttcttcttcttttttggatgtaggctctgggtcggcgctcggcttatctaagtcggacaacagttttccactctgtaggtctcagtgttagcctggcccttcaacgcattgaggcctagcacgtaccataaacgccttccaggtcttcttatccattctgtcttctggtgccgcgtaggcatccgtgtgttcgaccacctcaacttgattgctttcgtcactgatatcggacaccccatcccagtcaccttctgactcagagaaatcagagtcatcgtcttcttcattccctatttcagtagatttggcggtaggagctggcaaatcaagtggctcaaattgtgcttcgaatagtctgcggaatacgtcctgcgcattgtccactggaggagggctgtcttccttggtttggggcttagaaaccacagtggtttctctttttcgtttcacaaccatggtgaatgtgctatcgactaaattgtaaaatcgaacactcgcgtctcgacccaaaagtttttcggacttagctcaaagtcacgtgtgataagatacgccgcccctcgatttacacatccatcactgaatcaacttgttctccaattagccagaaaaaatgactaaattcagaccgtgcattgacctgcattcggggcaggtcaagcagattgtgggtggtacactcagccaggtggccgcagacctgaagaccaattacgtatccaagtttccggccagccactatgcgggattgtatcagaagcacgatttgcgcggcgggcacatcgtgaagcttggacctgggaatgaagaagcagcccaagaggcattgcagacatggccgggtgggctgcaagtggccggtggtatcaccgataagaatgcgcaatattggatcgatcagggtgcggacaaggtaagcccccggattccagacggattactatttcttcgcctgaattaggcttggttgagaactcaatgatatatatgcttttatttttacctatttgcttgcgcttcgtcatagtaagagtccaatgacgctaaccatgtggaatgcgggcaataggttatcatcacttcattcctcttccctgggggcaagttctcgctcgagcggctggaatcggttctttctgctctgggcggcgacaagtcaaagctgatcctggacctgagctgccgcagaaaagacaatacttggttcgttgcgatggaccgctggcaaaccatcacagagatggagatcaaccagggtatgtcctacctgcactgaacctaggctggttcttagcccactgacattatgtagcatcgatcgcaatgttggaaccatattgcgccgagttcctaatccacgctgcagacgtagagggcctgcaacaaggcgtcgatgaagaacttgtttcaagattggctgaatggtgtactatccccgtgacctacgcaggaggtgcacgccatttacaagatctcgaaaaggtccacactagtagcaagggaagagtggatttgacgattggaagcgcgctagatatctttggcggctctggagtgacgttcgatgaatgtatcgaatggaacaaaacgcattaaaatagaacataaatcaaaatgaatagatcaaaaatattatgatgacccaaatagtatattcctatatctatttcatcaaagtcgtgacaacaaacagcaaggaggagtacgagtcacagttgtgtctagacttgtcccaaaggggcttaggggcttttatcaactgaaggtccgcccgcctccgtcttcaacctcaacttctctgtgtactagccgagctgcgaccacctctttctccgacacagtacctatcccgctctttttgaagcactccttacctagcatcaaaccgccaacatgaagcccgtcgtctctgccttgaacgcctggtcttggtacgctccccatcccaatatccatcgaaacgttctatcgctctaacacctcgcttctcgcacagtgtcattatctctgctttcgcaatcatcatcctctcggtcctcggctcgctatacagcgtacgtctgcccgactctcacttacccaagacccacgaagacccattgtcccggacatacgtaatatggggatcagccgctaacgcgaagttcccaactatagagcaacaaccacgcatacaccggatcggaaggcgaacctgaagatggccccgcagtcgccgcctctatttatatcgctgtgatggtctacgccgtacgtcactccctaaaccctaggctccaagctccgacgagatcgttcgttgcatgagaaatgaatcggttactgacaatgcgcctctttggcttacagggcttcttcgttttctgcggtctccaggcttaccttcacatgcgagatagtaggggaggtgctatatcactgcattaaaattaccttggttactttacattcgatgtcttctaacacgtttatctgtcgattttcaatctttgagcttatatctcgggattttgagtacaacacggtggcttaaattttatgcgttgggcgtgatgagaccgagagataccctaattctctcgagtatgaatcactcatgttcactctgtgcgacccagattcgtctatgttacagatgagcaggatcagactaaacttgaaaggcgttggcgggcaggtttcccggtctcctttgctagaatacacagatagccgacctgcgacttgtacatagagcgctcataattatttccagctctttgatatttctttttttttttttttcgcccattagacggacgcatctaaagataaattttggtatagacattcaatcatttgtccttcgttgagaaatcaagttttgtaagaccgccaacgccagtgaatgcataatcagatgccgaggctcagctggacacctgatttctttttcgttttctttctcgttttgtttccctccaggttattactcctcatcctcccatggatccaacatcttggacatgtaaggaccatcaaggtagtacccgagacgagcatagtagctacgcacacccacaccggagatgacgctgatcttgcgactaccgtgctcctcgcgcgcaatacgctccgcctcctccatcaacaaagttccaaatccacggtgctggaacttgcgggcatcacgtccgtgaagcggcacagccgaaccatagacgtgaagctcgcggacaatactcgtctgctggccagtgaactcaggacggaaggtgtgcgtctcactgcacttgcgcagacgaagcaatccaataagaatatcctgcttcgggtcttcgtatgcaaggaaagtctcccatccgccattggcggtgtagtcacggcggatcaactcaatctgtgatggacgaatcttgttcttgacttcgttgataccgacttctcgcgtgcggacatcgcggcaggtcgtgccaaagtccttcatacgcgccaatgccagttcacgcaagttgccgttctccacgccggaggtgacaagtggcatggggatatcgcgctggactcggtagatacgggtccatgggggaactagggcgagaattcgtgcaacaaggtcaatgagtgcgttgggtgtgtagttcttgtaacggccggtacgccacagttcgtagaggccggtgccgcggatgacaagagtgggatagagtttgagaccgtcggtacggaagttggggttctcgaagtactcctggaattggaacagatcgcgctccatcccaacgttcggcaggtcgggcatcatgtgactgacaaccttgaacccggcatctttggcaagcttgaacgtttcagctactgctgctacggtgtggccgcgattggtgtctcgcgcaacgtcctcgtacagactctgtacaccaacctccaaccgcgtgcaaccgtagcggagcatgctgctcagatgtgtatccagacagtaatctggccgagtttcgattgtgatacccacacacttcacgttgctcatttcgcctgctagcacggcctcgtcaacattgtccgtttgatatccgctcagcgcgttgtgaagctgggagatgaaggtgtcccggtaatcttcgggcagcgacatgaaggttccgcccataataatgtattccaccttgtccacactgtgaccgagagctttgatttggtctacacgtcctcgtgcctgctcgaacggatcataacgagcgcggatcgctcgcatcgaggtcggttcatatccagtatatgactgagtggagtattcgaagtcggagtctgggccaccggggcagtagacacatatgttaccggtatacgcgatgtgggggcatcgatgaggtttgcacataaccgccaccacggcgataccagaggaggttcctatggacgaggttagcgatagtccaacaccctcaattggaaaatttaaacgtacggattggctttgcgattaactttggtaagatatatttcttgtagtgctcaggcactgccgcgataatggccgtcagtggcggcgagctggacaagctgtgcttcttcgaaaaagtagcccgcaacttgttgagattgagatccttcttgggcttggtagagtctcggtttgactcataatcttgaatcagagcatttgcaatgtcggaacaagctcgcatgaatcgctcgttctcaggtacgttctttgcgttcttcttggcggctctcttgatttcctgcgaggtcatagtcatggtagccatggcgaagagaataataccgcgcctaggcgggaaatctttcaaaaaccaaaaagcacaagttggttatacttagtgggggtgaggttgattagatcgaaaaatgtggtcaccgaggtctgcgcccgaagtctgatccgcttaagtaaaataaattatgccgagcgaaaactcccgggtgtgtatcccgaacaccttgcccttcatccccatacttttctttctttcaacttacgtcttatacctcacctctcctttcatacatacaatcttgcagaaatgcaggccttccgccgtaacaccctctcggcccttcgaaatgtcggtgccacccagcgtcggactcaggccacctctgcctatagcgagaccttgaacaaccttaagatcaacaaggacacacgtgttctgttccagggcttcactggaaagcagggaacgtgagtggaattcccgcgctctcattatcacacaagtataatactgacatttgagcttgacatagcttccacgcagagcaggcaatcgcctacggtaaacattcatccaaccgcgatcgcatccaaacaatagcttacacaagacaggcacaaatgtcgtcggtggtaccaaccccaagaaggctggcagcatgcaccttgaccgtcccgttttcgccaacgttagcgatgccatgaaggagacaggtgccacagcctcagctatcttcgttccgtatgatcacacctatgctctccaaatatcaggaaaacaatgctaactacaattagtccctctcttgctgctgctggtattgaggaggccatcgccgctgaaatgggcctcgttgtttggtacgtggccgacggagcttccccttgtaaacaactttatctgacagcttctcgttcaacagcatcaccgagggtatccctcagcacggtacggatctatcgagtaccaattgaagccgcgaactgatcgatttatatagacatggtccgcattacggacattcttaagacccagaacaagacccgtctgatcggtcctaactgccctggtatcattgctcccgtaagctaccactccaactttctgcagtcattcaagcctcgccaattactcacgcatctcgttcatagggtcaatgcaagatcggtatcatgcccggcttcatccacaagcgcggtcgtgtcggcattgtctcccgttccggtaccctgacctacgaggccgtcaaccagaccaccctcgctggccttggtcagtctctcgtcgttggtattggcggtgaccccttctccggcaccaacttcattgactgccttaaggtcttcctcgaggaccccgagaccgacggtatcatcatgatcggtgagattggtggttccgctgaggaggatgccgccgagtggttcaaggccaacaacatccacaacaagcctgctgtttctttcattgccggtatctctgctccccccggccgccgcatgggtcacgccggtgccatcgtcagcggtggtaagggtggtgccgattccaagatcgccgctctcaccgatgctggtgtcatcgtcgagcgcagccctgcttccctcggcaagacccttcttgctgagttcgtcaagcgcgaccttgtctaagatcgtcgctcattttcatgcatcgcgtgtcttgttgttctggtttttaagccggggatctgaggtatatgtgccattttatacatggggtttatgggctgctcctgtattcttttttcctttgcgatagagatccttgaagtaatcatgctcgtgtaattattactgtctgctgtttttatagagtagatggttgaaataagtaaatatatgggaaccattcttttcaagtccgtgaagcaggcttcttggacggtccctccctcactatccacgactgaatcctcatacagacatccatagtaaaacaaatgaacttataagccagcacgaattgtacagaagagcagccgccatgcctcgtcaccgcagctagctgtcccagttctcgaataaagcgagatttgatgttagtccagtatgagccagggaaaggaagcatcgactgcaaaacacgcatcctgtcgcgcgctgactcactgtgctaatctctttcctagacaagtccctcgagaccttgtcgatgcggaatagcacacgcactcgagcatccagattgatagctcaatgtatcttagtgacacgagctctagagatcaagggaagcattcatagccttgaactaaagtgaacctagggagactaaataacgaaagaagctattatacctacaataggggggttgtattctttagcttgttatcgagattatttgatgagtacaccttttaatattttcttgtcctagtcggagagggtgaatataaaatgtcgaagcaagaacggttcaacgcgaaggctattgatatgtttgagattgtattccccggggccaaggctggtgaagagagaaccgagtccggatactcaagggggacgcaaagggactttgataaaatacataccatgactacttaatacggtaatattcaatacaatacagaccatgtaagatctgtagagaacaacaattccctaagaagattcgaatgtatgaactgatttatcaacatgaagtaaaataaatatccagtgaggtaccaagtaaccgagagagatagagatggagacacgagtctattctacagtaaaattctatgagagaaaggtagactgcttttccaacatcgtattaagcttctcaaattataccaaattccacatgtgattgttttccccaaagaaacctagaccatgctgctaccctctgatactcagccccgaagagggatcatcagtctagcaagttcggaagaccactttctatcttgataggggctacgtcccagcgactttttggcttctcgggggccccgttctgaaaggttgatggcacacacagcttaccattcgaaagacccggggctggcgacgaagaattgtcattcgataatgtctcacgcagacatgcaaccggaactttcaataccacaatacggttcttcgcttgagagccctcttcctcgtccatccatctcttcagggttatataagttcggcttcggccaaaattagcgcgatattctctgacgaatctcgattggttccagttttcgtgtaaatgagctttcatccacgcagcagccaccgatctctcttgatggtcggacttgtgatcggtccttcgcggccttctccgtgcttccgatatattgatcgattgccgccgtttatatgcacggggacgtaaattctcattctcaaagagcgtattgcatccttcccgcgggggacatctcgggtgtgatatgcgcatatccagctcgggggctttttgcgaggacctagggtccatcggaacggcattcccagagattgacgatagatccttcaagtgcatggggctcactgagacggctttttcaacgccttctggcagagaaacatgagatgttgacataatagcttcatcttctcctgttcgagacatcgaagacgaagttctcgagggcaaagaatttaatggaacagccatgtcaccagctagtgcggccttgcctccattattagagtcatttttcgtctgttgactggaactgtcgtctcctgtcccattttcctcctcggggcctttgttctctaggaccttgtactctgacatttcgtcccctgtctcatcctcactcgagtcttcagatgaactgtcgaaactcatgtcgccgtggtcttcggaagccatttccgatccgcttgacccattcagcgggcatgattgtgccgaacttgatgcacggagtctctctgggaaaaaagcggcctcaggctcatgcggtgtcaaatactgtgcctggtcacttgttggggtgggataagtcgtgataggatctccgaagggctgaagctcgctcaggcgtatcatcagtttttgtttcaacttttttagacttttcctatctgttacagtcagattgctgcttgcgtcaagtgtatgagtaggtgggagtagtaacattttgactcgtccttttcttcagcggtgacattatttaatatccccaaagtgatctccgcctccattagcgaatctgcgctgcttggcctcggactggaaatttggagggcatggcttcggcaaaactcgactctgtcgtgtacttgttgatcgaatttaagtactttcccctgaatggagcagtggtaggttccatcattttgtttctggaaatcgccgtgacgaacaatgtccaaccaaccaatagatgggctatctgcgtctttattccaggaagagggatcacagcccatatttatggtcagcgacctttccaaatcgtaactctgtagcggctgtttcgagaaatgctgtgtgaaggtctgagctgtctggaagacctcttcataagaccgaatgaagtcgcggcgatatgactggaggtcttcgaatcgtcgtattgggatgtctctccgcgacccccagctaatgaaatactgagagctatccatgttgttcgtctcaggcccttttgaggtcagttcaactcctcatactcggtgtctttctcatacaatacagtaatttgttccctctgttgctcataggggtttcgagggctctggtattgaaatatgacttttcctcaaaacagtttcaaagcggatatctgggtaaagaaaataacgcaaaggagaagggaaagtgttaaataataaattttagggtttctcgtatagcgtgtacggcgccgcactgttatcggcacccttataccctggtcactctggtagagcctgcatttcaacagacacactagagaatcgaaacatcgagtacggacatacgacgccccgcacttgtgtgattgggttcaaaggtcccgttgcggtgtgcccaccattacatccttgtcatacaggggtcggtttcctggtccgcacaggggtcggtttcctggtccgcacaggggtcggttttcaggtctgcacttgggtcggtttccaggtccgcaccagggtcagtgtctagatcgcagttttgggggctatctacatttagggggctgggagcaaatctctgctcctccgtatatgcccctcgttccgtacaaatccaggccagcgatgttctctgaatttcttcttgagcacaagtcttgacacagttttcctgacagaagtgtgtgtattccgtcctccgtatggagtacggcttcgcactttccgcctcttggctagattcattggtgttgttatcatctagattctgtactgccctatgattcaaaatagccgtgtttgacgcaattattgtgccttatcaaccgtcagatgtagctaatagaggcactttttacgttcagcttcattaacatatcgcgacggaggttgcatgatagacagagattactacaacataggctccaagcgtggtatatactacagcagttgtaggtctcttagttgggacttccgggtgactcgtggttttattagcgcagttttttctttgcaccatgtacttggctaatacttattatactaatgtattgtacatccaaggctttttattagcagtgcagctgatgctttccctttcgatttattaatttctcccttttgttgactttcgttgactttcgatgatcatcttgggcaaactttcacaagtaatatgccgggtataggctagaagccacatgatggacggcctaaggtcatagcaccgaatgtatacactagtggcgtcgcggtccctgcagacctaggctgcctaacgcacccaaaatgtacgaattcttaatgtgcgacggtcaacttgtcacttgtgtcgacgcagggaagtattcatgataccaatcctagatcaataaaggaagagagcaaaatcgttaaaagtcacgatatgacacgtctttttcaagggctataactagcccaggtgtaactctgatttgtcgatgagcagatggtactttgataatgcagtgaatgagatgaaattaggcgaaaagtaattctataattatgaaacagaagatttttttctaaaaggtagaaggatcgtacttttacttggaaaaatacgaagctgtcacatcacaggaatttggcggtttgataatgtatggtaccatacagtggtatgaacatgtaaatgacagtactgagaatttcaacttggaacggacatgctgacaaattgtaatgtatcgggacctcacctgcccggggttgataagtgagcagagtgagtcaagagacgagtgagtcacctaagatagtagtataaaagcttttgaagggattcgaattcaccactaataaacatcaattcagcatttggagtcctaaacaaaatgaaatcattggaatttacccttcccacggctttgatactgatagacaaccaatcaggcttctgcgatccaaagacaatatcttccacgctgctggaggtaatccacgtttttcactcctctacaactccggagtctccgttccacccttccaaccccgaacagggtatgcgtcccctagacttcgctacccctgcctcagatgggtcggagccggtcttttggaaaagtgtcaattcgtcttttattgggactggacttgaggcgcatttgcgtgaaaaggggttccgtcagcttatcattgctgggttgacgactgatcattgtgtttcaactactgttcgaatggcggctaatctgggggttgtggatcggtatcttggagatggacctgtccggttgagatcggatgggactcatgagaatgacttgaaagttgacaaggggcgtattgtccttgtcgaggatgccacggctacctttgggaaggctggaattgactcggagactattcagaaggtttctgttgctagcctcgatggcgagtttgcagatgtattttccacagaggaggtcattaaggctctgagcaagatctaaagctagcgtgatagtgctgaatttagtgagactactacatctcttccactcaagccccaactattttctactccgtaaatttcaattatttagtcttcttctcacttcaggctctatttcctggatgtctacaatgtctacgagtcacatcacagaaacctggaccgacagattgtctctctcatccccgtgtacattgtgcatatgaacaaaataaaaaatatcaattagaactgtgtggcgggttgccactacatataaacatagttgcctttgtcgtggacaaggatagatcaggtcccagggcgcctctgggtcccagccccctcgcctttagactcgggtcaactctcgcaactcccccaaacccctcatcttctcatccaaccgcctcgtccctctactcctcctcgaattcccactcacagtcactgaggtcgtggctcacctcagtgctgtcaccctccgtgtctgatttcccccccatgtcactcagacactcatcctcgctctcctccttaaatcggagctcccacttctcccactcatcccactcatcctcttcatcgtcctcgatcgttggaagagggatgggttttgaggtgtccccatcagtgaggggccatgcccattggagaaggccatccattttgtcggcatagtcctccgcgtcgaagttgagtgctggggtataggccactttgagccggccattgtcgaaatacccatgcaaaactcgaactcgagcatcggggagaaatgagatgaccattgtctacatagatgtcagtcagtcatacattgtctatcatttgatggagcgtctagactcaccgggaagtcaagttggggccgctcatgtcggtggtacttgccgatttggtgcttgtggttctggattccactaagcatccatcgaacaagtactatgagctctccaactgaggggaaagtgtcatgatagcattcttcgcttgtcatgacggcgagttgatgagcgccctttccatcagcatttacggctcccctttgaacggtgaagccgtacttgtcgttgctgttgaagagacttttgtcttcttccatgctatattcgtcaacggttagtctcaatctgctttctatctattcttggggatgtagacttacgggatcaggtcccagtaaatgggggtgttactgcccctctgagatttgcggaggtacttcgaaaatgccttatagagttgatagtgcatctcttgggggacgaagtcttgatttgtcttcatcgcccgaacccacgtgaacgggtcgtccacggggtcctcggggtcgagagcactattggcgattttgaaggtggtgtcggtgtcgggtgtgaagaattggatgagggaacgatcggtattccccgtccagaaatccatcgggtggatgtcaatgttggaagcctgatttgggatataatcaggctccatgtggaggagctctttgtggagctgccgaaggctcttcttcttctctttgaagagccaaacccagagtggaatacgacacatcgtgaaaccacctggggatgaatgatgaagaaagaagaaaataaaaaggaagtgcagagaacgggggcccttttatgttctcccttggtcaaatcctggtctgcctccgacatccaagactatatcaactatgcctaaataagatacgggccaggttagacccatgggttcatcgcgtatctcaacatagaaagcttattcttcggtgctggactgcttcggacgccatattgggtagcggatagcttctgcttagatgtgtaccaattcaacaatatatagttataaatcggaacacagataccatggtataggaaaccctatattctccgaattcctttgcagtatctaaagttacatgaccattgatagatagttgatcagagaaagatcagaacaagatgaggctttagtgaagtaacgtgtatttcatagtaagaaggaagtgaaactaatttgaatgccaaatgccacgcaagtagttgtgtggtagaagcaaggaaggaaacagtttatctagaaattggaatatattgaagcgtgacggaaaatcatgcagcgcgtaacagaacccaaggttcctgttcaaggcctagatgggccatatcccattcttgacaaggcggaaaccatgtaggcataagcgcaggcggtttgctctaggattttgactggctaatcgcaatatatggccaaatgattgagcctataactcaccggctcttcattttagcggctgttgaatccagaacgcagactgcaatggcctttttctactaaaccattttgagcgtgatagttttagacacaccatgagtcggaggtccgggccgcaaccattttaagtaattttgactacgggcgtgtgcgctggctaaatgtttcgtagctgctcgtcttgaaatcattcatttcgacaactaatatacgccatgaatcctgccgaagacaaatccgcgcctcaaaatcccggctttgcccaactgggaatattcgtaaagctcccgcttgaacttcatttgacgatagggaaatatgtcttgggtgaaatacatccagcctctttcgctttcgctttggctgttctacgttgcagttgatatgtctatcaaaagatagcagatcggcttttcagggactttaaacatgagtttcgagttgcgggtagtggattgagtttcaacttcactgtcaaacaaacgcgcagccattcaagccgttcacaggccatcttcacacttttccttgggggcgagggatagaatttgggcctctatcttgtaagctggcctcggtctgtatagcgcgtcgtgggaggcaataagcgggcttctacgcgccttcggcattccatttaggccatgccgccattcatgcgtacaacctaccctgtaaaataacgaggtctccacaatctcttcgagtgtacctaagcgtccccgcgggctcagattcttcatggcattcagcacgggttctggcttgcctggtgtgaaaagctcagtatcggtcggacctggggcgacggcgttgatggtgatttccttggggccgaggtccttagcgagaacgtggaccatctgcttgacagggcccttagaggttaagtaaatgagatagggatggccaattgtggaagcgtgacagagagttgaggaaagaagaaagattcgggcgttggggcggaggtgagggagtgtcttctacaatcatcaaccttcagtttggaggacgtgggtgatatgggtaaacaagctgagatcggatggcacaatgaagttctcggtaacatacgctttttgaatgggccggtatcttcctaggctcgggcatctgcgcttctagtgcttcctagtctaaaatataaattgagacttgttagaatagcacaatagaccaatgttgtatattagtggctgtggctattcgtggatacgtattgtagttaacatatagcaagcactaacaatagaagagtggccaggttacgtctccacgatctaaagtgtgatcgaccataaagctacggagtagtgatagcatcaaaggggtcaggttcactaggaaacatctactcgaaccagattatcatcgccagtgatgcagaaagcgctccacatcctgcataactaactgcaacggtctgcgagacctgtcctggttctggcagacagttctttgacgaagctggctgcgagataggtgcttggataatgtctgctgtcttccattcttgaggtatcgaatttggtacattcgacagtgactttcgcgtccaagtcgcgatgatatgttgccactcgggcatgggaggcctccaaatgtctaaattgcggaaatcagggtctctaaagaccaacaaagcattattgacggaagcgaatttcagcacccattctagacaatcggaagtataaattcccggccccagctcattgtccaaggaactattgtgaatgaccggggtgaaaaaagccatcatcgcagctaaagctgcccgagtagacactcggtacaaaaatgagcctccgccgagtttacttaaatagtctttcctaatcttcgtggctaggcgatccttgttattatcccctttgactcgaattgcggaaatttcctgcggcagacgttggggtctgttgtcaggaaacagctcctccaatctatgacaggcgtattggtatccaacctgaagtgggatgggatcaggccggactggcataacaacaacaggcggctgattgtatccaaagaaataccgatcgtacatcgatgctggaagtttgtcctcttcgaacagatgctccaagatccatcgtacaccgacatttgttgggatgagtcgcacctcatcttcgagggcaatcgctgggtcgttaattgcatcgaccagctcatcaaggcctgcgagccaaaaaatgctactcaatgggccgatcagttcatcaaatcctaaagtcagatcagcaaaatatcctctagctttcgccaaaatagatataggtctgcgtacgatagctattgctgtcaatgtactctccgatatcctcggggatcgttcccgggtatccatgctctcttgaccataccgggcggaatcctgcttccgccaactgacccattgtccgagcgagtttattccgattgtcggaggccatattctcttggataatgggagttgtaaaggggggtgttcctggcactatgctggctgatgaggaagttgagtatgtgagagatgggatggacgaaatcgaaggtatagaatcagtcggactgattgatgtggctgggctgcttgccgcagctggaaacggaaagctttcccttgggtccatgacttgatcaatgaattaaattagatcgcaaggagttgaattggattgcccgaattccattctaatattcctggatatatgcatagcttcgctcttaccaaaagcaatggcacctgccagtatatccgcatcttggtattgagtacaaatataagaagcgagggtcaggaaactacatgtgtagtgtttccctaccgaaaaaggagtcggatcttaacaccttaacatggtatcatggtccatggatcccccccggcttacgcctgacagaccgaagtctgacccatacctccggtgggtcagcactccctctatagacgatgtataccccgacgggttattttctagctgtagaagggagtcgatgacctcgaatctactgttcttgcttccagaagacaacttctgatgaaggcctacgaaattctaacaggaaaatagattccactggatggtacttaattctacaagaataatactgaagtctctaatactattcaggcaaaaggatagttaaacgaggatacggagaggtccttattagggtaggtcttcaagacggatcgacgtatacttcccttacaactagtttctatagtcctaaaggatacagaaagctctttggtataaataagctccttaaggagtaggatatcctacgagatacgtccgaagcgacttataaacggcgaaggaaaagtagtcggattcgtagatacttcctcgggagtgctatacctcgtcggtccctcggaggagaacgctagaaaattgtagtccttaattttttcgctagataatcgtagtctctgctttctactagaaaattgtggtctctgttttccgccagagttccctactggtcgggtggctggtaagacagtcacctagtaggtctagatccgataagtagatagatagtctcgtcccacgtcccttttctcccctcgctatctatcctatttctacttgaaatttacaattatcatactagctacctagctatttctagcggggagcagagaccacgattctctagtacaaatacctcgggtgcctaggtaacctatgggtacgcaggtgtatagcggccaacagtcggatgcctgattttgatggttttatggcctaattgggactagctctgataattttcagaccgcctttgacaccgcccaataccatcttttgtaagtacgcattgaagagacgaactaagctgtcagcattgggtaattcaaatgccttctaccccaccaataatgaagctatttcaattccgaaaaatgcattcaaacactggatagtaaaaagtattgagtaaattaaaagtgcccggtaattgtaaagggaaattgggataaacaatagaattcttcaataaatgcgacgccattcatacatctcggcggcccagataaacacactcctctcctacgtacgtcttccattcttcacctctaccactcctgcaagcttactctgaccactagcttacgtttctctcgaggtaaacccccatatgcctactactctatcgcagagtctgaccgatcctgtctagagtcgctatttgcacttctcgttgcgctatcctccgcgcttttctccgcgctgttcttcgcgctgttcttcgcgctgtcatctgccttatccgctgccatgcctcactctatggcagatacgctcgctctccttacccgggtcaaggatatcctattcggaatgctagaggttatcatcgctgcgaagagggtcctagaggaagtcaaggggatgcttctgatagctaaggatatcgccattatcaccggggagctattggccgctgcaggaggtctcttctactggggtcggtgggcccaatgggtacaggaggctgcgcgctcctggctccaatggacacaagctgttgagcattcctggctccaatgggaccaatgggctgagagtattcgatacaaatggatttatgaatgtcttcttatactctttattttccaatggagactagtaattaaagtaaagatccaattaatcaagactaaaaagattaaaagcggtaacccgattaggccggttgtcgtgatggtcctacccctgatttctctcgattttggagctacctaactgccctttatgcctccaaggattgatctcgagccttataaaggcgagatcattgatcttatctctcacaagactacccatgaagatattatcgctctccttcaagagaaatatcagattctcatcggtcttactactctcaaaagccgccttcgagaatggcaatgtccagtacgcactcagaaagccgatatccatgatcttattgaagagttactccctcgccataatacacaggatatactgaagattctagccagagagggcacaccatcctcagaacggactatccggagggttcgggctgatcttagtatcaaactccggctttctcccgaggagcgagagcaacaacgtgatgatatcgaagctattctcatttctgagagtatcattagcgatattgaagactttgggcgccgtactctacatcgtcatcttcgggcaatgggacaattttatactgagtactactccaacttttgggaagcctattcttactaaccattattatacaaataggaaacagatctctaccatttacagactcctccgtcccgacgtaattcaaggccggctccctggccaaaaacggcaaagacttaattatatgtcgccagggccaaatgatgtttggcatattaatgggcatctgaagcttgaaccattcggtattgagatttatgctgcaattgatggctactcgcgctttattgtctgggtctacatcggggtcagtgtcagtaccgcagtaagcgttaagcgccaaagtctcgatgcttttgcggcttatagcttccaaccaaggaggttccgctctgaccgagggacagaaactgttcttcttgctgatacgcaatatgagctccgaaagctaggtgatccatcagtacagatcaacgattgctatctctatggccggagtatggataaccagcggattgaggcatggtgggctattttatcaagggcaagcactggcgtttttcgggtaggcaatgatgatagtactatatgatactcgctgatatctatctaggattttttctggagcctcgcacacgataacctctttacgaaagactgcattcccgatcagatctccctccttgcgatctatatgccgataatccgacgccgagtacatcaatataccgtgcactggaaccatcatcctatccaagcccagcctcaacggccgcacgttatccctggaaagccaaatatgaacttctactactctgatgtaccggaccttcgctgtccaatcgataccgatccagactcaatgtcagaacaggcacagctattccgacatctacaacaagatgtggaagggtgggatccggatgaatatcttccaccgtctacacttgcctggtgtcagcagcagcttacagaaattggacagcaactagcggggatgccctttaaccccgaggatccgaatcctggcctcattggggatccacgggccccataccgagcggtgtatacagagctacgggcgcgagcgtttgcgcattggcatactggtcaagatccaatactcagcgtttatacgccaccgagaggtgcagctaattggcggccggataccgatgtctcgggagtcccagagagctagtcattactagaatatgggtagctttagtaaatgatattatttccctaatcttctccttttatcctttatccatccttcatccatccttcatccatcctttatccattctctattcatcctcgattttttgagaatggccgatcttgatcccaactttatagcgcggtttatgatcgcttggcggcaagtaaactcagctacacctccctcgagtgcacctccctcaggcgtacctccttcaggcgcatctccctcgagtgtacctccctcgaatgtgcctccctcaagcgcgccgccggcgtatgcaccaccagcatatacaccaccagcatatacacagctgttcacctcgggccagcttacaaatactccattctcggcgctccacaatacagtgagcagtaccaggcttggatacaatcggcgccagcatcaacaaggggtgataggccagcaagtggcggagcgggatatcccaattgcagtgaacttctatctccaacagtctccaggagagactgtaccaatccccaatggtaacatatctcttctttaataaccaagcaagccaaagctaatttatctgaaattatagcctcgatgctgattaccctccctccgactcagcgaatcggctttatcgacctttgggtcaggaatacgctattttctgcactgcccggaattatctgcttcagacctcggcttgaggataagttctaccttgctgaggcgatgattaagggcgcaggtaaaaagctggttcctcgatggatttcaggggtcgacgctgagttcgagggcacggtgaaggaattccttacaaaggttccagcaccaaaactacatgtggttgtcgcacggtatgaaggcgcaattgataattggccggactccaatattgtggtacgttcagctggtgaggccgaagaagtttcccaaacgcctctacccagctcgccgtctcatatatggataccacctcgttcattcggatcaccgcctcctgtcgcagttatcgaaagcccaacccgtccgagggcaaggggccgaaagcgagcccggccgcaggctgagggcccttcgccacgccggagccagaggatacggagagtttgaggttcatacggctggcaggaatgggaactttatgttgaaatccagacttggctttcgaaacgttttgggctttggtgtcagtggcgccagcagtttttctccggaaagtgcggagctcacttttcgaactttctgcccttggatgaaatcactcaacgtgttgttgtacgttccaatattattggaaccctctcaacacaagccgagtttcccctcatgtatttaaaggcctgcaaccatttggagaatatactggtgtttactatcggaataacctcttcagtgcgtaagatacacaaatgacgggattgtggcgggtgtgaatggcttcaaatgcgagagattcatatggttggagggggtatgaatagcttcatgtttcaactttcaagccgttctgaagaactttggtactctgctgactaggagatctgtcatggtaattcaggtattttaattttctgccagtctaaaactggtatgagctagtcctaattaggcaataaaaccatcaaaatcaggcatccgactgttggccgctatacaccttcgtactatgggtacatattcccgcctacattcacgtctcggcaaggtatattatattcaatgaaaaatattctagataactgctttgtgaatacagaaaatcaggaacccaaaacatatctatctatcgggcagaagatcccaaagccaacgccttctattcattcttttttgaggacgttttggggatcttccgcgtccgacgacgtagcatctccactcgttcctccatagtccagttgacttgatcaccaatggggatcagacatttagcgaggtagtcgtagttcttccggagtaggttcacagtgataaaaatataatcgacatttcggaagaccagagcgtcttccttcgcatagcggtccttctgcttgaggaaagcgacagggtgatctctccagtgacggcgcgggttcaagtggtgagaagtgtggtagccatcattgaaagagaatcggttactctgatatttgtcagtcttgattcgacgtgttcagcaggccaatggaaactcaccggaacatcaatcagtgtgatactggacaggtagtccgaattagggtcggctggatccacgaaagcatgctggccccagttgccgaccatcaagcccaagcgcataacggtgagcggaagaatgaacacgaacgtggtagcacgggcattgacgtagttgtaaagcatataaatggcaacgtagctgcccacctcccagaaggcgcatttgactgcatacttgaactgcccctttctccaaaagtacattgggagttccagccagatgaaaaatatgaaccggccgacataggtcaggaagtccgggatgctgtcgcggttgtagtacatggttgagctcaggtcgtctccgccgttaccctcaacgtgatggtgtttgatatggtggtagtagtaagagttccacgtatgtccgtgcatggggtccagcaggtacgggaaaagcgtgtcgaacagatataattttggggtcaggactccattcatgtggatgtgctggtgcttcatcagcgtgaaagcaccgcaataaaaccccataatgagccagtgcaaggcgccgtggaggtacgagaatcggtaatataggaatgcagcacttggcacaatagtggtgaagtaaagtataaggtgcgttaccatgaccacgtcggtctcgtatcgcacgatccctttcgcccagttgatgtatggcgtgagcacatacttctgaaaggaagcgggtagcttggccctcagcagcggggtatcccagaattgggagacggtgggatcaaattctacatgagagggatcattgagattttgaagcttttggactgtttcttcggtgctcagcttgtccaatggcggtgcatctttttggcctggacctttgttagtttgttatttgaccgacaatacaggggtattaccatctgagctgggttgaggctcaacaatagcagcaatcaccagtcgatcttggtaggtgagctggggatctgtgtatgtagagggatccatgatgccttagtacggcaaagcctagtctttatgttaatcctgttaaatataactcaacggaagggcactaacccgtgtccaagcagctgattgaaacaagcttctagaataatttccgggatccccgggtttataaagacaatcgaggcctagcaatacgctgtcctcctaataaagacaacgcgtcaggggcgcgaagagatttcgggagtcgactgtgggtcctggaatcgacaagctatgcgaagtgtccaaacaacagtttgaatgtttctaacacttgatctagtattttcaaatacagctcaagctttccatcgccatccgagagtagttggagatctcgctgtcgatcaatcatgattttgtgctgctccgtcacattccatccgattcagggggctcatggtcggaaacgttttcccctgaacatcccaccgacttaattagtggcgaaaagcacaacgaatgtacgattcttgatttaatatacgttgtatgcatgtggaatagtagcttggatttacaggaagtattcctaagttctagtctagtgaatgagatcattacggcaatttacttttctggggtagccccaaggaagatcaccactaaaagagcagttagctcgcctaggcatgacaagttggaggactaaaaacagaggtgactttcttctcatttacttttctatgctagaggacttcaaggaccctggtatacaatgccttgtctaggccgaggccaatgcactgtggaggttgacccgagaacctgaccggctctattcagagcactgacaaagaaataccggccagtccggttggtaggaacagatatctcagtctcaaagccgtctttaggaaatttccccaagaaagtggatgctcccccaccaccctcaatatcggttccatccaaagaccaagtagccacttccgtggctccattccaactcacatacactcgtccatcatccacggcaatctcaggcacggtctgaggatgaccgatccaggggctcttcgagatccgataagtacggatttctccgctgttaaagaatgtttcggggcctatatggacattgcagagcaaagatccgttcgaggcatattcagcccagtttgcgttgggtccaaagcctaggatgacattgccgctatccaagatctgcattgacccactgttctcggtgaggacactgttcgggctgatgtattcatgctgcaactgcacagtcatcttctctgtgtccaggaccaccgtcaaaccccgggttgaacctgtcacgggacggccagggcagttcccgttgtcgaaaattgaaacaatccgaccattttcgtggaaccgggcatggtgctgaccgttgaagtctgtcgctgcgccaccggataggtctttgaacatatttgctttccctcctagcttccagatcacggcgcctgtttgaccatctacatagacaacggagctcatcattcgacaggaaatgaggtaattgccgagatcgtctttctcgatgctgttgacatggaacagatccggcgcggtcttttcggttttgccatcgcccggctggaaatgatagtactcttcaaatctataatggtccgaagctcgccactcaaatagaacttctcctgtctggacttcgatctcctggaaccctgcatcgaaaatgaattcaacttccggtggtgcctcgaatgccgtttggttcaccggaaagacaccattgataactagaagtgccgtccctgaaggagtcagggttaactcgtgcgcatcaagctgccacccattgcctgaacggatctgataagcttcctcatagcgggagtttatctaaaggacattagaatattccctgatgtaatgccgccaatcggcaacttaccaacgcataataggttgagtcttcagaaagcgagacaacatagtcctctccttggaaggactgtatgtctgcggtgacatacccagtcgtgtgccaaacgagatacccttttgtatcaaggagcatcactcctgggatgttcacctgctttccccagtagggcacgacggtgtaaatgctctcattgtaacacagggaacttttgtcgtgaatgttcaggataggtccaatagcattggatgagtggtacagctggtgaggccatcggtcaaacgcgccaaggtcatatggtcgcgatcgatacagcgggggaatatcagccaatgactcgcatatcaccaagagcaacgccacgggttttaaaaacatgattggacatctcataatatcgtgggttaaatcgagacatggcagccgtatgggatatggcttttagccgatgtcgggggacgatcccaacctccgctgcagcgccaagcagatgtgcgcgggtgaaaccttagggaagtcttggtgcttttgttttggtggagcacctgcacatcggattgcttgtgagacttggaccttccgacctgcttgtaattgtcttaccgtggcttgtggtatgctagattgccttcttgtactccgtagaggctataaaatacatattagcaaggcacacgctcctcggcgtttcgaaagataccccatgatcgacatgatatgagttggttcgtgatgagagctgtttatttatagtcaggggttgcatctgaactcggagactcggcatattgcctcaggcttgcaataaataagcataacattggcaagtggaacgagttcattaatctgtaaacggtgatattacttcgagtcactataatattaggatttacagaagcaactttgaaatacaagatgcggcgaagttgtacttttacacaaagaacatgcggctcggataatatatccatcaatttgaagctatcggaagctgacggtaaatcccacctcttctctcagggcatgatcttctatggtcatatgatatgttggaaaaggcgttcctttgcttagaaaattttcagcgaatcgacgtccagaaagacgaagtaggtctcagccatcaagaggcgatgttgcaactgacatccaaagacaatatcctgagaatatcttgattatatcctgattattctcatagatgcccaaagccgaagaaaaatgtctcacttcccctctgccaattctctagctcctcgtagttcctcgcgaccccaggccactaaggctggatgcagtaagattttcgccaccttggcacatcaatggtacagacccaattttagtagttctttgacatcatgacctccagcgacaattgcaatatctgttggtgttgaggttaatggtgttgttagtgaatgtttctttctccgggacattcggaatgtaaacctccgacagggggatgtatacagacatggagatcgctcttaatttagaagaacaagtaatcaggatatcttctgcaaagacacgctatgatgcgtatctccacagttcgaaaaccatcaaaaaacaatccgtgcacataaagatcgctactttccctcctgaacgtcattttttcacatccaactcagaataaataccagccacctaccccctaccttcaactcccaacctcttaaaccaccctcttaaaccacatctttctcccataaccataaatcatcacatcaaagcctaagatgaagttcctcacatgccttcttatgctggctacctctgccatcgcagctcctatcaccaacaccaccaaggtgtcgaagcagttccaccttaagtccagcggtgccaccaacgcgaatcacaacaacctatatgtctactcctaccacacgggcgccggtctcagcgacgccgtgctcaccagtgatgttagcatagccagtcctatctacctgaatgggacgaacgcggtcgttgatctgaagactgaattttcctggggactaatcgccaccggcgacaccaactatgcctgtgagtatcgccacatactttggaaatttcttcgtgtcacatttcagcctggactaagctaatattttctttcacttagcttgggaacctatcgttatcaacgctggcagtggcggcagcgcaggctactccatcaagggcgatgccttccaatggtcggaaaacaacggcttcggtggctggcttggtaagaaatccctgcgcctttattcgttggcctctttaagaccatggtattaacatctctgtaatagtctgcgattggtaccacaatgcgccccagttgttctacttgaaccgttactatactgccaccattccctccagctgctccaaggtccagttgacgactgagtatatctagataccccacggtcgcttggggtgatttgggccccttttaggcacttaatgatcgacggttaggagtccggtactcctgatttttactagttaatagcgatttcagcgaataatgaatatgagatgcttgtcttttcgctatgtacattctgctagttcaaaccgggatatcaaaaataaaaaataaactagcagctgatcaactgcgtaacatcatgttttaacgtaaagcgtttcccgtttctttcctcgctgtgcccggtcatgaagctgcaattcctgcgatggggacacacgagttctcgtagtaccgcttgtccattccagcctgcaagcgcgcttcttcgttaaatggtccccggatcggtcccttgaaatgcttctgcacattcgaccggaagacctgaacaggatcagtcccctcctgggcacatatccacgtcaaccaccgatgaccagtggtaacatgtgtgatttcatcgttgtggataacctccagggtcgccacgctctcgccgtcgccagctttgcggaacttctcaatcgtcatggggttgacatccagacctcgtgcttcgtgcaccagggcgataatactgattctcgctcggagatcgtatgcggtttcagttgccgatagccacaaactgtggtgtaccgggagcgaaccgaaactagatcccatttcttcgagcctagtgcggagcagagagaagtgcttggcctcgtcgctcgcgaccttcagccagtcgtagaaaaatgcccgcgggagttcctgggacgtcccttttgtttggaatgtcgcaaagcggatgcagatatcaatagccagatcgatagcccacagttcgatattagccagcgcatggagcatagcaatacggctcttcaaggtcccgcctcgtcccgccttcggcatgtggcccggatcaaccgtttgcattttctcgcgcggtggctggtcaggcggggcgacagtgccccttccaagcggcatgggtgaatcagaaacctccctagtcgtgaaaatagagaaaagatgcgtagccagctcgatcttgtgctctggattggcggtgttgagaacgtgggcagcccagtcacacagcgtcgcgttgtcgccgagataagtcgccataccgagatcatctggactcgcaggaagagaaacagtagtagtagtaatagcagctgccttctccgcaggctgcgggtgcttgagctgcactttctcactcacaggatcgacactagcaagtccgacgctgaccccatcctcagcggggaaatccagcgcgacgaactcgccgcgcacatccaccgggaacgtgcaggccttgataccaacgctcgattcaccggtctctacattgaaatcgtatgcgtgccacgggcacgacacgacatatgccgagtcctcaatgtcaaccgaggaatcggccattgggccgccagcatgtgggcattctgcctccatggcgtaatacgaccagccgtcattggtctcgttggatttcaggcttgatttgtcgatcgtcgggagccggaataagacaagtttcttgcctgtggtcaggcgaaccacgtaccgcgcctgtgtgaagtcggatagtttcccgcagttgatccacattttgattttggcaagcgtcgcttgtagcctgtttgcgtgattggatgggtttgtgaggcttttcgcttcgattgacttaaattatcacgtgacgatgtctatggtcccacctcctcggcgcgcatcaatatatcttgttgtaggccaattataggggcacctagctaggtacgctatataactagattatgttacagtgtacccgtctaattctaaagatcatccatcatcaatcttgtgtaaataataatgtaaagtacgtaaaatatgtaattaatatgtcatggatacggtaaattggcatggtaattactagtattcctggtacatataacgtactgtaaaaaaaggctgtacatatttaattagcaatagttataactagccagggtataaagtactaaacacctgcatcaattccaactaaaataaaaaagatgttgataaaaactaaccatagtaaaaatctagtttgtgaaaactctgcataggtgtcgaatatgtacggttgggttctcgacaacgtcataatatttatgcaactaatgattgagccattattcgtcttcttgtcggtttgcctgattcccctttctttccagtccaaaaatctgacttattgataaaccaatcataacatacagctggggcaagattactgaatactaaaaagattgctagaaaatagttaaatagcggtgaaaacatccttgttagatacgtaggctcgggatccagtcttactatgcacgagaaagtaccagctatcaccatgactgttggcgtttacagcaattccttcagaggtcaatgactctccacaaatacatagcccatcacaatgtgatggagcggcagattgcagcggattttagacgcctggttcccaaaaaatgtgggcctcgcttgtctcaattaatagtccgtaactttcctgctgtcgcagatttttccctttagcaggactatttccttataatatttaggctattgaaagccgtcttgcacttatataaatttggagcgacttgacttaggtagagtgtgaagttgaaaaatacgtggtttctgactggtattcatcacgtctgtgacgacttcccaaccaacaccaacacttgagcacattctgcgacaggggggttgaataggtctaggacaaataatacctagtgctcactcttttatttctcttgtctttctttgacttctcatctttccactttcaactcacgtttcaatccccagagcagtgacgatttttactccttaggtgagacactcgctaactaactctaaatgttttacgatagactgacattgtccacagaacactatctgaagatgaatactggtcccaaccatccgatcaaatggggaacgtgtcgagaaggcgtcctgtcccagctgcaacgatttgagtccctgccccaggatggcctcaagttaatggagtcttatcaggctgtccttgataacgatgagactttcacccaatatttctcagacaagccacttgaaagttacactatcgaaacacgtctaagggaaacattggggattcgtcctcctaggcagaataatccctcaatcagctgggtcaacattttccgacatggcagtttcgaaaagcaaagtgatggctcctactactgttatgatgaaggaaagctcgtggaaattgacaagtcccttcacaaatgcatcctactcaaccgatgcttcctcccgaccaactcgtacctgtggccaagtcctgccgacgctgaacgagaagctgaagtcactttggcaatcgaggcagatatcctggacgaaatcgacaaaaagatcaagtgtgcgtacttcccagactttttgacaaagctggtaagagacagactaatgaaaacagacgtggagaaattgaagcgacttcagctggctctgaagaaacgccgaaataagctccagggcattcgagtccccgtgaaaaggtctcgtacgccgcaaacccctgtacagtaccctacaccaaacgagtcacgtcgtcccacggtctccgttgagacacgcgatgcccgtgcacgcagttcatccgagagctcgggtatctcaagtggatccgacatccctttcgccgtctccggtgataactcaaggccactatcgtatgacagagatgatgcggctggcagctcaggccaagagcattcgaatctcatcgatcttgccgaaggcaaccagaacccacacgataataagatgggagtgtcggtggctagacgtcgcagcaacagaaatcctgaggtcgcaccaatccagcatgacaaacagaagtctaagcaatcccaaggagatgagtcgcctaaacaccagctcgatgacacacagaagtctaagcaatcccaaggagatgaatcgcctaaacaccagctcgatgacaacgaggacctggtgcaaccacctccaaaaaagcaaaagttcgagactgagccgctcccaacagatatcgtccaaacagatatcattccaacagacatcgtcccaacagacattgtgccaacagatatcgagactatcgaccttagtgaagaattgccaatgtggaaaggaaaggtcgatacgcccactaaaccgcagcccaaatcttccaccgggaagcgcataggacagaagcgaacacggaataacttcaccgactacgagaagaagcacgccccagcctggttcaagagccagatagacgcaggaaggctcccggccgatgttgagaaggcctatgccgaaaagtttggtgtcttccaccgcttcctcacagtgaagctttgggtcgaccgaatggaggaaagggccagtagagcacagcccccgagcaaaatcgtggtattgaaagtacaactcccgttgcagcttcatatggccttcttgaatgacaattcctcctagccgatccggaagttcccaacgagccgggcaatgtcaccggcagctgtctccagtactagttttccccccgcgccgccctatgtatctccatatcccttattccgccctaatgggctgccgggctcatccgtcgcgtaccagctggactggccctccaaactggctggattaccctcaactaagagtggccttccgaatgtgtactgataatgacctggatgtcggttattgcaggtcctctttcatgatatgactttcatttccaaggcccaagaagctcgctcacggtatgttccatcatttgagtatgttccatcatttgacagcatcgtgaacatcttactaatctaccttcctacagaattctcgttgagcgtgaaatttattttccgtttgtggtgtggattcttcgtgcagctggtttacacttattttcatatcgcctacttcatatgctacttaccttgtaataataccatttttactatttgaggccacccacctagttcccgcagtatcaaacggttccaatgggtagacgcatgatgtccatatgtagagtctcacctacatggctcccttcttcgacggccactgtcactcttgatgtaactccttcgacgtaccctatgattcactttctcaaataagtagcgcgtagctcttcattcaatttacacttcaacgatccacttcttcatctcgtcaattcagccccacaacccgttccttgatgcagcctcccttctataccgtctgacatcattaatgcaaacgcgactttcactaatcccgcgaaggcaaaagcaaacacttaaacttaccgccagcggaaaatcattcacatctcagaacagcctcaccaacgcctcgagcttggctaacacaatcatccggcttcggcctctgccagcgacccccgtaactagattcacaattttcaaaaaactggggcaaatacagtctttatggtttctcgatgtggggtctcaaatgtaagactcagtattctaggaacttacatggcttctactcaatctcaaccgccatgcatttcgatgcctttttagggctcgctctacaggccgctctcgttaatagaccgccagcattatttagtttgagtccatataaggaaaaggcacgccgaagtagtcaccttatataggattgtatcataataggtgtgaatcaaaggtgaaaggctcactcttgctttaacatgtgtattcgtttgactagtaaaccgcgtagaccgcgcgtttctacgactattcctcttgactcaattgttcctttctacttttcccaaactgtttgcctctttcgtcattcctgacatcgttccggtgatttggattaactgcatttattcacgtcccgaagctgtgaacgaactatggatcatcaccaccctcctacccaggtctcggaccaggtagcggcgcctagcttcttgtcgggtgaaaccgacagcatgctcagttcatatgtcgcactgcagagcgaccttgacgaggcttacaggaagtacctcggatatgccgacatcattggtagaggcgacctgatggcaccgctcttgggcgactcgattttctaccccgaagtagaaagaacagccgctagaatattcggcgagccacgcccacgcttggttcaaggcaacgtccaagcacccattgaatggaccgatgtccttcgtgaatcgctaactcctggggatttccaacgacaagaaaacggcatgttcctgtgccgcgttcggggaagtttgattgaggtttctgaggcgagttaccttgagatcctcaccggcgtcacagaacgactcttgcagccattgcaaaacttgtccgacgagcagaaggagactcgagcacgcctcaaactgggtgcctacctgcatcagacacacgagtcactcgtccaatgtaagcccgcccacttctatgacttgttcggttttcaaactaatgtgacattcaatagttgccagcgcagtgcgcgagtctatcattgctttgggtgtaaacccggctattcatgatatgcagctcagctccattggatttgctagagctcgactgcccaccccaatgtcggccccacccgtgactcctactcagtgggtgccctacatgtccatgtcccacacagaaggcgatatccatgagagcactatcaaagaggaagaaacagaattcgttcggtttgagacccctggtatccttggtagctatctggcggaaagcagacatcctgacagcagaggaagggttcaatctgcgcggtctgacgtttttcgaggtaatttcattgattctatgagcgagcgcaatggttataccccgtcatctgtcgacgatctgagttccattgatccagccagcagctcggattattatgcttcgtcaattggcatcactcgaagcaactccactgattcagcgagccacaggatcgcgatggatgcatatcacagtatggtagcggcctctgcttacctgaaccacaacaactatttcaatcccgaattgattgatagcaacgtcctctccgtcaacaaccatgcggtcgaaaacacggatgccaatgtcaattccgatgtcaatgcccgtactgaaccgtctaaactcacctcagagatgaacgttaattcaatcactccatggttgcgcgacattgatacttccagtgatgtaggcggcgatgctgaatcatttggatccaacatcccttggctggctcaatccgaggacgcatcccgtccggctgataccgctgcagaacaatatggaacgagataccgaggcgtaaagagaccccgaactgaatgttcttccagcgaatctgaaagtaagccaggggccggtacaagatactctccaagggaagaggccgacgggcctgcatttgtgaagtgtctggtcgacaaaggatctacttccgacgaaattgaagaacaatacttcaagattttcggggtttcccggtctgcgaagtgtctttgcaagaaattcgagatgaggggtacttgggggttgctgaaatctcaccgagaagctaagatgcagaggactatggtacgcagccgattactcccgtcttatatggaactttactgacgactcttctagtcatcttagtcctgctgtgatcgatacaggtgattttcctatggggtcggagcccagttggctaatgggaatacatatgagatggaatggctttggaaggaaacgggatagcaagggtgttagtttagaggatggtgaagacctggaggcatcatagccggtcatgaccactctcttaatgacaatttcctgatattacaagtccataagtccatacttaacttatcactagagtaaataatggtatgctcggtgtcagtatatggtatactccctagaggtgtacatagttagaatcccctacaggcgtacatagctagagtcaatctgtagtgtttttttcccattgtactcacagcaattagattggcctcgtgatcgaaatagagactgaggtgttccctatcctccctccatcttctttcttctcatcacctttctgttcatcggaccaacaacgcgtctcaacttttaaaccaaagccttttaccaacattactctcttttctgtccttcgcctgaacagttgccaccgtcatgggtaaaaagaagggtgtccatgttggcgtccgtgtcggccaaattgaagcattgcactcaactcaacctggaaccaagcactcaatagaatccaaggttttttccgaagaaaggaagtcttcggccttcggttttgattctgagcttgaaaaggctctcaataagtttttcggtggtcctccttttttcttgattctacctgataccattgagggccactccaaaccttcgacaggcaagagagcgtgcaaaggccgccggcacccaattgtcgtagttacttgggtggatgtactttctgaagcaacaaccgcaagtcaatttcagcgccagaaaaatggcatgtatcggtgtcatgttaaaggaaggttgatcgaggtgtctgcggagaattaccacttcatcgcattgggttacccccaacgtatgatgaatttttcatatctgtccgaggcacagagagtacaagaggctgctggagctgtgagagaacaagacgccaaccctttcaatgatggcgtggatcgtgagtttgctgtcttccctggtcagttatctggatactaatatggaacaacatgcacagagccgctcaactccgcacccgacccaatggacatgacccgaagctcaattgcagatcttttacgtcaaactgagaagagtgccatggtctcataccaaagtgagagagatgtcacaggaacctgccatgtggccgaagaattccaggctgaaacaacacggcttcgccccaaccacaggcaggttagtctccagtctcatcgcaagcagggtttctctagtcggactcccattttgatggcaaacaacccagtcagatcagaagataacctgatcagatctgacgttccaacccacattgatgatcgcggggcaggaagcttggatatcccgaaacagtctcaatccgaaacaagtggtcccggaaacaagaacaaactcctagttactacccatcacgagagctcttttccttcttggacctcctctccgaagaaagaatggcgcgtgcgagagggtccagttgcatccaatacctcccctcgtgcagcgccgactattcggtattcctcacgcgaactaatcgagggaccagccttcatcaagtcgctcattgagggcggcacatcgtggaaagaacaggaggagctgtaccaagccgagtttggtgtttttcgctcccagtttagacttgtcaaaaggttcggcctggtcgacatgaaaaacggcggctttggcaagggggcgttcaagaagtcgtcgagacaactcaagtctcaggtatgatatcttccaatcactcttaatccgttctctctcttacttgatcaaccgattaacatctcttaacagtcgacgtacaccaacgtggagcgccgggaatccagcccgattgaggcttcccaggccatccgccgggcgcgggagaagaaaagggacaaggggaagaaaagggaccccggcccttccgaccctgcgtaggtcagtgattcgaggtcgggccgggggcctaaattgctagttcgaacccaaatctcgacaaacgaattgagaccccgctagcaggggacagaaggaatatgagttttgggggtgatgatactccctgaacatgtgtaagattcagaaacagaagcacaatgaaagcgtacgcaaaagtgatgatgcagtcgtaaattaagttgttaagtacataaggtataataatctcggagtcggaactcaacgtttcgttaataatagagaactaggttcattccacagtggacgtatacaacaaataggaaaaagaacctcatatccaccgtatatgcttcaaaaatgtgttcttacaaggcgagagcaagacccagcacaccaacggctccagcaagactcatggccacaccagtgggggcggcaccaccatcggcagtggtggatgaagcagagccggaggccgaagcagaagccgcagccgaggacgaagcagcgtccgagccagtggcagcggaagaggaagatgagaccgtggtagtagaagtagaatcggtagaggacgaagcggcagcggcagatgatgaagcggcagaggacgaagcggcagatctagaagcgccggagctagcagcaccagagctagaagcaccagagctggaagcgccggtggaggtggcctcagcagtgctagggccagagctgcttgcgcccgagctggtaatttcagcggagacggatgatgcgaaggaaggatagtagccctcaaccgcggtagtaacgtacgccttgacgctgtcggggaggctgctgtaccaggtcggccaggagttggagacgatgccttgctcgacttgcgaaaggaaagcagcggtattggtggcttcggcccagaatgagcttgggacagcagttgctagaaccacggcaatggaggggggaattatatccgcgaggccagcgtctccggattcaatagcggagttggtgtcggccggggcggccatggccatgctggcgaggaggagggctgcgagagacttgggctgcatggtgacggttggaggaagtatatactcggggtagaaggaggagataaaatggttgtgaagacgagctatctctggtgtaattgaccaagtggaagaaaaaataatcagcatctgggggctttatacctaatacgcctgatgcggaccctggaaggcaatgcgaggctgcggcatagcccgaatgagaccatcgcgctatgttcccgcgttccactagcaacggccaatcgcagcctcgtcgcccccaaaagttgtcgatcaaattgaaaggttgcacctgagatgttacgagaaatcttatatagcgcaagcattcgcctaacatctccaacgttgggggctactgtaggcgccctgctgcgaaattacccgatgtacgatgtagggctagaggctaactaacgtctctttttttctgatttcggaactcatcctctgtacgagtcctggtattcctcagaggatactacagtgaattgaaggtccggtgttctatccgttcgccaagtcccaagaccgcattacgcacgcctttttgtacggagcacaaggctctccatcattggattcggaggctcttgaacgtgtttatatgacgtcatttcttgggggcccttggaaataattcttgctgcctttgtctgtacggcgtttgactggtgcttgggtggtaatatccccacctgtcttgtgtatggggttagcggtgcaattcaagggttcaatcagacgacatgttatcgaatagaagtttttattgtacgtaaacacaacacagttatatgcaccgcccattcaaacatctcctcgatggcaagtcattggcacaaggcatccaatagggtctacatcatacacagccgtgccccacctgggcacaaggctgtgttgggtaaaagaccataaataaccacctccatgtagtgagactctagtgaaatcgaatcagtctacagcattgctgcgacatattaagttgggcctgtttgagcactcgccactagtgcttgggacgttcatatagccactacattctcggcattcgtcatggtcatgaaccactcgggatcagtagctagtatcttctatctatgttttaatatctcggttaatttatatcgctgattgatcacacctatgtatgtctgcatatatgtgtagggggcactatatatatatctggtgctaacggtaatggctattgttgtgccacttcgggcgtgagccatcgaactctacatatatatatatctctcgcagcgatatatcaagcgtgaattcttttctttaaagaaatataaaggcaatggattccgcaccaaaaagtattgccatttaccgtcagaccaaggctattatggctccacttgatgtgttgatgtctacaacgtggttttgctggcaactttctctattgatatactacagcaatttcaacaatccgagacactccaaacgaaatcgttcaaatgaaacatcgcaatctcattttgcatccagttcgaaggaataggatagatagaaaggacaaaaaaaagaacaaaatcgcgcacttctgcctgaagaaacgttggggctttttgtttttcttgctgaaaatatggccatcataagtcagcctaaatgcgtcagttctatgcgtaatagaagctcccatccattgttcaatgtaagcttaatgaaacaagtctaaaccgaaaaaaaaaaaaagaaatctctccctcggggaatcgaaccccggtctcccgcgcttatcggttttaatgacaagcggaaatcatcaccactagaccaaggaagaatgcgatgaccgagttactgctcggccacttggctggttgatgcaaaagtgatgaagcgaatgacatatgtaccacacattcgcaaatgatactcgttaatccatgctctcttccaatcgtacgcagtctattggctggtctaacttgcaagattgcaagcaagatcccaggctatctgaccaggctatttctattctccgtgttagagatagtccgccctaatctcaatccccaccttgaatgttctcaaacggaaagtcctggagaagtccgggtctttcagccgacttccccgcaggaagaaataaaaccgttaggacgcgcatttttctttgcggtttaaaaatcacaaacaactgtcaattatgacatccgttttcaagaatgggcgcatcttcgtgccgtcgcaagctccggataatgaggggaactttgccgagtgcatgatcatcgagaatgacaagatctcgcacgtcggctctctcgatggaataaccatcccagaaaatgcaaatgtcattgacctggaagatcggactgtcattccaggttttatcgacgctcatgtacacatcctgcattacgggcagtcattgcgcaaagccgatctcatcgcatgcacctccctcgatgaaatccgcgaagccatcaagtcctacgccgaagccaatccatctctgccgcgcatattatgccgaggctggatccaggcatctaccaatggagtcgcattagcaagtatgctggagggtatcgacccgcgtcccatctttattgactccttcgacatccactccatgtggtgcaatgcagctgctctcgatgagatgggggctcacacggcccccgatctccctggtggaacaatccaccgtgatgaaaatggacgagcaactggcttacttgacgaatccgctattatgaaccttgcatggccttatctagaaagtcttagctccacggaagacaaactgagtgcgttggacactgcagttgctgcgtacaccgctgccgggtataccggactagtggatatggccatggacgaaggaacatgggagattctgaatctctaccgtcgcaatcataccatcccattccacatcggcgcccactggctcgtccctttctcagcggatcaagacgccaacttcaaatacgtggatcgagcgattgagctacaccaccagtacaacgagcccgatttccatgtcctcggaataaaaatcatctgcgatggcgttgtcgacggatgcactgccgctctcctccaaccgtacaccggtaaaacagatcgcgtcgagccaatctggcctgagaatatgctacaagaaatagtccagcgcgccgactcagcaggcatccaatgcgcaattcatgcgataggcgacaggactgtgaaccaagcaatcaacgtgctgtcgagagtcggcacgccaggccgaagacacagaatcgaacacctggagatgacaacctccgaagacgccaagcgactgggtcagctgggtatcacagcctcaattcaacctgtacactcggatcctacgcttttcaaggcgtggcctggtcttgtggggcccgaccgctgtaagcgcgcattcgcctacaaggacttcctcgatgggggtgctcccattgctatcggcacggatgcccccactgcggctcattttcctttccctaatctttacaatgctaccactaggcgctcggcgattcagaccgagactgatgatactgtaaacgaacatttcaagttggggttgtctgaggcggctactgctgctacgactggtgcggcttatgcgcgacatgcagattcctggactggaagcctgcggaagggattatatgcggatttcttggttgttgatatgcagtggacgccggagtcattgcttcaggcgcgtgtctgccagacttggtaccgggggaagaaggttttcgactcatgaagtgattgatagcggtagcctatagacttgaaattagatagaagaatacacggatgtacattctctattccttatgacgtcgggtcttgtgatgcggggtggacatcacggtgacatcaccgctattgcctcacaacagccatcaaaatgtagatgtacaacatacagtacagcacgcaagtaagatatagaatatcaattgacaatttcttaatttggagtcatcgcttcatgaagacatcactactagttccgaactaagtcttccctttgaaacttcagtgtagtcccgagtacaacgaagtatacgaacgccaattactggtcgagttgttcggggtgctcttgcagcccacggtcggtacttatatcagagaggaatgaatctgatgtttgtcagtacaaaagctttgatctcaagagtcgtagtcgggggtaacaaagacatactgtgatctacgtcctgcgaagaagaccgacgtggatattctggggcatgctgatgcgcaggctgtggggaaactgaagttctgtttatttgaatcagtcagtaatgggatacttcggggtagacttcaaaaattgtgatataaacgcacggggcgacatcactgtccagtatgagatcctcactcctgatattggattggtcttgctgttggtgctccatgtttccgatagagctacggcgcttttcgtaattaggatctagggggttgtgatcaatatccgtcttgaccatgttcgaatttagagtagactatgtggtggcaaatggtggattggaggtatgtgaaagtgttagattggggaaaataaactatttatcttatactacgtacgggaagcctccgatgtcataagttgggcgtggcaaacttatgatataaacaatccatgcggacgcggacctatcagagtcatcgtgatcctggtatttgaacaacgaatgtcgcccatattgaatattggcggcgaggccatgaaaaagagttgagctcttgtgatactcacttgaagtcgactgactcgttttgcactgcgaattaatttatcatggccgaaattgtatgaggtcaagtgctcgtcaatgtacgacacgatggcaaaattagtaatattctgggccattcgattgtagtttaggattgcgaaatgaaaggacaagtggaggagaggtatgagaaatatagatgtagtactaatactcgctggttcatcgtctatacattttgatctgtcgtctactcttggtatatgacctttctgcttgctagcttagcatcgagttcgaaccaccgggggcaaattgcaaggcgtcaaaatctcgccggggagaagtaatattcagtttccaagtatgagacaagtcagcgccatgtcaacaatttgtggcggccctcctcgcaacatacatacagtcacaacagtgagatgttaggcttctggtgagtgctgcttgtgatttcggacacattgccatgaccttttggtctcacgaaaagacattcctcttgggataatatacctcgaattgttttgagagttgagaatctcattctgggttctttcctccagaaagtttcccaccatgtcattcattcatcctaaattcattccgcagccaaggtgacaggccatttgtcatggcacgtatattccgcggtgtatttcaaagatggcggatattatatgacaacagaagggattctgttgctgacattctggtgtcaccaatgggtcattggcacgaccatatgagtagcaatgtcgtgctgctaccaaccgaaatcattgtagtttgagccgaatgaagattttccctcgtagtccagtattattcccgactctaggaggtctggctcacgttggtttgtccctttgttgaatgtagatatttgccagggaagcagttgcctaaacaggaaaacacactagtaccaaaccggaaatggaatgcgatcacaggaatagagaactccgatccgaatttgcttctgcgcccctggtacggagttcatgatcaaatatctcgaggttctagaaaccgagatgcggctcaagcgaccgttaagtgctattaataggtttatgattacggaaggatagccaaacgtatatattgtaggaaaagtacgctatgaaatgactgacggccgtgacaatgacgaacaaactcaacgagacaatactacaccagtcactgaaagagtcactattttcctaaaaacctcttgattgatgattgaagtacggagtaaaaaggccattcttggcttcaaccccactacatcttggcttcttcatacagctaagagatccgatattgaagctgctagatcgcgaaccgcggaatgcacaaggtcccctctggacccgctggacggaaatcgtctagctcgaggtgtatcgtgcagggtaagccgagcatgattcgcctcgggacagggccgacaaagccaatgtggggtgcagaagcagatcatttagctaattcttcatctaaccttggaagcacatcagaagaagacccggtcaaagcaacgtcatgaaccaaccacgttgtgtgaagttgaaatcgaccccggggcatgttgtcactagtcctaatggggctattgtctggagaagtgggtggagagaggatgtcactgttcggatcctcagttgacaggcgcacacaaattttttcacaggtttaaagagagcgggatttgtcggttttctgaaggtttatgcttgaagtaattgcattgctgtttgcgactacgatctatataaaaatctttgaggtgaaatattacatcataccttcaaatttggttttggttcactctggatccggaagagaaacaccaaggctgcaccaatctataccagccttgaaaagtgtcaactgagtcgcggtgggatcggaatggtgttcacacgtggcgatatatccggccacgatgatcagacaataggtaaacccagaataccaccaaccgagatctagaatattaactaacagcgacatagatcatcaagatcctagcaaagatgtcataattgtgtcctgggatgggccgcgagatccaggaaacccatacaactggtctctgtgcgagaaatggcttctcacagccctcgccgtgttcgccaccttcatgaccatgatcaacggcacaatcatcacagtagcccacgatcctatgaatgagcgcttcaacatttcagatgcccatttcccacattcatactggcccgtcacatcgtgggccgttggcggtggctgtttctccctgctggtcctgccgctcatggaggatttcggtgtgcgatgggtgttcctgggcacgtacgtgaccttcatctgttttgtcgtgccccaggctgtggcacagaatttttacacgttggtcataacgagattcttcgccggtggttgtgtctccatcctcgccaatacctctggcacggtgattgggaatgtctgggacacagagctaaatcgcaacgttcctgtcagtctttttatcgttgcctacctgtcgggtagtagcattggccccgtcattggggctgctatctaccaggctctcacgtggaggtggattggctatatccagatcatgtggtatggtgctttcttccctctgtacttctttttgttcagagagtgtcgtggaattgcaatcctagggcagcgagctagggctctgcgacgtgaaggccagaacgcttatacccagcatgaaatcgacacacaaggccagtcgattttgagtattgtgggccacagtgcgatcagacctcttttcctcttcttcaccgagtccgtggtgtttgtatcgacgctatggtccgcctttaccgtcggtacgttgtacctattcactcaatctgttgagcaggtgtttgtagccctgtatggctggacaccagcacaagctggatacgtccaatcagcagtcgtgatcggagaacttctgggatgggtggttaccttgttctcaggcaaactttacttcaactcggcatcccgcaacaaggaaattcccggtacgcctattccggaggcccggctgtacctcgctattgtaggcggtatcttcggcatctcgggtggtatgttcacatacgcttggacctcataccccaatcttccgtggatcgcaccggccgttggtctcgccatggtaggggctggcagtgtcattgtcgtgacgggaatttccgactatgtggtcgatgcgtatagcaaatatgcaggcagttgcatgggtatcattgccactggtgagaacaccctggctgcgttcctccctctagctaccatgagcatgtattctcatcttggcctccgatgggctagtacgctactagctttcattgcattggctctatcttttgccccgatattggtgctgatatggggcaaagagatccgtgcacggagtccgttcatgaaggaagccatggtggaaaagaggaggaagagtatcgactcggtctgacgaatttttctctgtacacaaagcgctatgaggaacatattgcacatattaaagatttaagaacttgtttgttcactgaatattttctcgtgtttaagtttatcgttctcccttcagggctgatgcccgtggacaagtaaatcaagaccatcctacgccccaggagtttctcaaaggcttagccatggggctttgagacataactagatagattttagtttgctctaacctaagatctaaatttaaaactatagccgacattctcacctcatgagccccctacttaagcaagaacacttggagagtgaactcaagactgtaaacttcaagcgacaagtggatcaattgtaagcaatatagtttgaatcagggggaattttcatagaactactccataaatgtcggagatattccagattgcggtttagaccagtattgcgctagcccgaaatgaagtcccccccttaacctcccactatatgtccttccacgtttgtttttcaaggccctcgaggcgaatgattattgttgcttaacgttatctcccgagaagaatatatctgtcagccacggacggaccagctagaaaaaaaagaagggaaaaaagggggaaaagcccactgtcctctgtatcgcaacccacgatccaactaccaagttaggaataatagccggattatcccgttagtcctgctccccttcaagaacgaggggtgagacaggctacgaatccgcctctcttcttcctcaatgagaagtcgtcaaacaacctgtttttcctcatgaggttgcttgcatgagtcgaggaatgacatccccacgtttctgtcaattgtcgaattctagatcgtttcagggcggacgatcaaacggtttgattgccggtgccctgtgcgatggtctgaccatgtacatatatagagttagtacggagtttatactgcgtttgcactagctgggtacctccgccgagactatcagctagtttctcaggggctggaaaaccttgattggagttgaaacctccagccagagtctatattgattgcatgagaatcgtggatggttagttctcgatctaatagcgccccattgagctagatacaatacatgctgtttttagttctttttcggtgtcttactttttggtttgatagtcgatatggcgatagtcgatacaatatatagatcagtcgataagagtagtcgaatgcaaccgtctttttagttcgacgatgagacatcctgacacgtagatacgtacactgatctgataatgatgatctatgtggaagatgacatgattgtacattcctgttcttcggatacaggtgtgcaaccatctcaaagtaccaagctcctttaggctactgatctcattgaaatctctgatcaggagaccgtacgcgacgagtcacagtagtctaccgactcacatgctgtggggtgtatccaaagcttggaattatgtcaccctatagaaaccctacggtacctgttacccatgtggtctagaactttgctcattttatttatgacatggctggctggggaaaagtggaccaggcacagtacaggtacagggtaaagatatacaaatacaaatctgtttggcttggttttgcaggtagaaagcactcaggtataatattgcgtctatataatataaatataatataaagttactaatagatactacgtgcccaggtggtaacccccactccgtattctccccattagacgagtcccatgcggcgggctgtggccccaaacgagatcagtcggaaataccggatgtacaatccaaagcacagtctacatacaattaggcctcggagaaaataacaggagaaagtcgggaaggtttcaatgcatgtaagcgcccactacacttctgaaacaacagggcgggtgcttcacatcgcagcgccagtttgatgagccttggctgtctccacctatcccgttggactcacagggcttttggccgaaaaggatatctaaatatggcaagtgatatgtttatcacttggttatgcagcctgatcaccatgtggattgggccaatcatgaattttgacatacaatactatacaaatatacaaaggggggtatattcgctttgataagaacagagtcttggtttgatatattccaagactaatggctattgcacttggatgtatgtgttgcttccaagaccatcttctctatatgtacggagtatcatctgggcatctatggaagtatatgggatgtgtacctgaccccgaataaactgatttccccgttcgaccctgtaaatgacggataaatacagcgtaaataaccggcaataccagattaatgacataaataacataaataacacccttggaccattaacaaccattattcaggcctccgcccggtatgactaagaataacccaaaataacattactagtttatgaccggtcagacgtccctgggcgcttcccccattcccagcttcgattattattagacttgactgtatcttcttcccccccttcttcttcttcaccaatactcgagcttcttcttcactttcgtttctttcttccgctgcgcgcgaaaatccccagaggcttaccggctggtccagttccattctctgacaatctctctttctttctccttgtctacgaggctggttcctccgttcccttagcctttcgtgcattccttgtgtgatctagaacatctcccgatcggatatcctctttactgggcgacgttgatcctcgcacttccggtcctatcccgttcacccattcagctggtgagtttgatccgaggtctcgcagctatgtctcagcagagtcgcagagggttccttgaattggactcagatcgcctctttgtttgcgcatgggttatcatgcggtcttttccccggtgctaattatctatatagtgcgcttttcacagacaaaatgtatcctcaaccaggtgctccaattccgatggcaccacctcaaaagcccgaaacttttatgctctccaccgaagcacagcgaagcctaccccatgacgcgcaagttgctcttcagcaagtggataatcgtatgtctttgggttatctttatcccccgcatcaaagcaatgtattgacatggggccagtgaaatatttccttctgtctgctcccgttgactggcaaccggatcaactcattcgacgcttcttgcttcctacgggcgactatgtctcttgtgtttactggttcgtctcactcttgagcgtgatggtttgggaagccgactaacccggtctcaataggagcggcctcttccacatctccggtaccgatattgttcgatgtctcgcatttcgattccaagccttcggacgtccggtgaagaactcgaaaaagtttgaggagggcattttctcagacctgcgaaatctcaaggccggcgtagacgcggtgctggaggatccaaagagcccattcctggacttcttgtacaagaacaattgtattcggacccagaagaagcaaaaggtgttttactggtacggcgtacctcacgaccggctcttccttgatgcactggaacgggacttgaagcgcgagaaaatgaatcaggaggccaccacggtcgcagtcagcgaaccggccatgtccttcgaattcgactcgtctcagtctctgtatgagcaattgaccaagtcacaacaagtgaatatgaactcgttcgctgcccacgcaagtacgacatatggccagcccaactcccccgtgcttcggaccgttgacgcaatgcctcctccgcagatggctcccccagcgatccctctgatgcaagacgactctgggaatcagatgtacagccaccaacagatgcccctttcgaacaatctagtccagagcatcattaagcgcgagcaggactatggccccatccagtacgatcgccacggaatgcccattccccgccctcatcagcgccactcttccatgccgaccttctacgagtactcccctgcgccatcctttgtatcttcacaatatgaggattacagcaatcgcggcctgtcctttgaaccagtcaccccgccacagcattcggtcggacttggatcggaaccggcttacatcgccaacgaagataccggactgtacacagcgattccagatatttcaagcgggcctgcctatcaccatatgatgcagctgcctccttcgaacctgtctagtgctcactatcagcctgtgccccggtcctattcggcaaacccgtatcccgtcatcgagggatccccaacatacaagcagcgcagacgtcggtcatctatcccgccgaacagcggtgctgcgacacccagtggcgcagctcatgtccaatcaacgaccccgggagtccaggcggtctcgtacgctgctcacagacctagtgatctgcggcgttcggtttctagctcagtcgctccagtcacggagggggatgaagccactcaggaactcgctcgcaattacccgagtgcgctgctgccacaaaaggatctttatcacgaaatgtcccgtcatagcacgccgctgcaaagcctggatcaaagcactgcacatcattcaggctcaatggcaaaccaacccaatgatctgacatctctcccaagcagtggtaccatcgagactgcggttcaaaatcataatgctcggtcagagcgttcagcgcctggtcctactcggagagccaggagtgcaaccatgatggagttgggaccgtatccaaccaaggcccactcttgccctatcccgtcatgtggtagaaccttcaagagattagagcacctcaaaaggtaagcttacttctattttgtcactcaccctggtggcgcaggtttcaccgagcgccggtgagttcgtttcaattgccgccgactaacccgtttttctagacacgtgagaactcatacacaagagcgtccgtacccctgcccttactgcagcaaagctttctcgaggtcggataatcttgcgcagtaagttattattgtcttatttattatacgacttttgctaatattcagtagacatcgtcggatccatgaagcgcagcaggatggtcagacaatctctcagaccgaggaagatctggagaacgatacacatgaattcggttcccccagggaagacatgtccccacagcccgctcacacaatgattagtatgcccaacatgacgtcgatggcagctcctttgagcatgccgtccgccctaaccggtatgccttcacacatgatcgctccgcaacttctccaacaacacatgtgagaataccatagagcacgatgtgtctgctgcaaaacagtagatgcaacatctcatgtaatcatcacggggatttgtctcaactttcctttctctttggagtcttcaaggcgcatacaggcgtcctttttgggttcggggcttattagcgcctcttgtttaatcgcacatggtctcatgctggccttgtacataccgcgatattattgtatagcccgtgtgttatgtctttgcttgtctttgacacagtctttcttttcctttggttttgttgggtttattttgggttttcgaactgtgcaatggtcacaggaaacgccgtgtattattggtgccgactgccctgcacgtgaattgggttgcgctggcagacattcatttcacgcctggcgggcacgggcacgagcgaggttcgactatctctcaatgggaaatgggttggaaaggaaaggatttgggtttgcttcttcttggatcgtcaggcattgtccacgaagagcggctgagaacggtaaggttattttgcacgcctcaaatcacactatatagacagagacattgtgtaacgacttgaattggaaacagaaaaacacttgaaaatcttcaactaccaatattttcttgctagtaaatgtccacggtggcaatgatgtgatcaagggctggtatggtcctgaggtagtaggtcacgtgccgctgacgtcgccctcgaggaatgggatctcagcagatcgcccgctgacacaccgcgctttgatcaacagggctataccctgtcgccttttagcttctctcagctactaatctgactgctggcagtaaatgatgcgtggttgccaacacccagcatagccccatctttcctttccgacgatatctacttccccacactccaacaatccacggtccacactaccacgaacacgaggattgtaaattagtgaaggaaatctccggtctcagcaactaccatcgaaaaggcatatctcagcttacttgagccccgagtcacagcacagtcagctgctggaaatcacagcaggcccaatcatatccaaacacaaatcacctagtttcatgagtcaatcctttcaacgcatcgaaagccggattccttaattttcccatgggagccttgaatttcaagcctgcccctggttatattgacgagagctcgcctctcatggttgctactcgctctgcggagaggcgtggtgtgcgcccttttgccggtgccgatgagtcgtctaagaatgcgctgtacatgttccttttgactctttctattggtgggtgagtagttttgtatggggtgatttgacttgtggtcatttattgatattgggtttctttgacagacttcagattgtttggtctgtcgaactttctaatggatcggtaagtataagtcgcgacttacaggagatgatttgaccccaactttgcaccttacccctttcatttccgaagctgtaagactgaataaaagaacatgctgacgggttacagccattccttctatcccttgggatgagcaagtcgcttcttgcctttgtttggatagccagtcccttgacgggcgcactggtgcaaccatacatcggtattcgaagcgacaactgccgactcgcgtggggtaagaggaaaccatttatggtcattggaggtgcagcaactgtcgtttcattgctagctctggcatgggtgaaagagattgtgggaggtgttctgtctatattcggggttgaaacatcagcgattaagattgttatcattatcatggcaacaattttcatgtgttgccttgattttgccattaacaccggtgcgcattccatcttcacttttttaatggttacttggctaatcttcgtcctatagtgcaagctgcagccagagcatttattgtcgacaactgccctacccaccagcaggagctgtccaacgcctgggccagtcgtatggtcggcgttggtaatatcttagggtatatctttggctatatggacctgccaaaggttgtccctttcttgggaaatacccagttcaaggtcctgtgcgtacttgcctcggtctttctgagcacaactgttgccattagttgcatctatatccaagagcgggatccccgagaagacgggcccgtgactgacaagcttggcttggtctcctttttcaaacaggtcatcaagtccattcggagcttgccaacgcagatttcccgcgtctgtgaggtgcagatcgcagcgtgggtgggctggttcccgttcctgtactactccacgacctatatcgggcagctgtacgtcaatccaatattcgcggataatccccatctctccgagggtgaggttgataaggcctgggaagatgctactcgcgtcgggacattggccctccttatctatgctatcatctcttttctttccaatatgttgcttcctctcttcgtggtccccttgtatggaccggcgccagagactgtttcgcaacgggattccctagacggtgatttagatggtgattcagagccagctgcaaggagactatctttttcaagcatcccgacaggcaatgcatccgagcctctgcttgacgttccagtcggacaagagaccgaagagaaacccacttggctttctcgcctgcgcatcccaggcttgacgctcccgagggtctggctcctctcccatctcctcttcgcggcgtgcatgttcagcactttcttcatctactctcatcaagccgggtcggcatttgtgggccttgtcggtgtctcatgggctgtagcattgtgggctcctttcgctcttatctcggcggaggtagctaggattgatccttctagacgaaatcgtcgccgagcggctcagactacttataccgagcatgcagatgaggcccaggatgagggtcccggtgaacttgacagcgtcggtggcagtgatattgagaatggacacccgaaagattatcgtgataatggggatgttgcacaggcgggtatcattcttggactgcataatatggctgtttctctcccccagattctgtctagtcttgtttgcagtgctatcttcaaggcatcccagaagcaaagaggggagccgtgggatgatagcgtgggctgggtgctacggtttggtggatgtgctgcgttggtggctgcatggttgactagaagggtttcggatggatcaagatagacatgatatgtagattgtacaatgcatttatcagttcttgtacatgttccgatgttgtatatattcagttttaggcaacgtataacaaacataaagattctgcagggaatagcgatcgtcgtgcaaagcatgtgggtcctacattcagccctagagtcaatcaaattatatcgcataacgatgatgtgttgcaccgaatcggccaaccctttgttcctgtttatttggccgaatcccgagaatcggcccacgtgtaattttaaatacacgatacgcaaaaaaccttacgctatcaccgtattgttccagtttcaccactaatttgggtctagccagccctgccgtattctgtattgtacaacccgtacctgacctcatatctgtccctctgatgcaacttaaacagtccgtgtcctattgctccgtactgctaacccaattcgaccttgtcgcaaccttccgctatccattcctttgtggattatgtgcgcctggtcctgccatcttgatatcattgtgggagtgaattgccagtccttcgctctggcctttgatacttcccaaggcgtgagccgcgatggctagccaatttatgaacgatggcctacacgccctgcttcgtatgtctctctgatcgatggctctgaacgttgcgcttcgatttttcatttggactgggagctaacatgtctatttctgttgtagggagggcctctgaagactccgaccccgatggtacgcgtgcctgaaccccctcatcgctcccctctcgtcttgtcgcgatatagcgctattcagcctcggaaatttgactaatatggactgcagactcccccgaggcagggtccaaggagatcacgagctcctgggcattgtttatcatgatcctgttgttgatgttcgccctcttcacgagctatatccttcagcagaggaagatccaagctgtccatgagacggttctatcaatttttgcaggtaggcaatatcctcgagtggtgcaggcgcgatctgaaaatatacaatatacaaagattcatctgcgcaaattggtacggacttgctaacggtcgctagggatgttcgttggactactcatccgtttcacagactccaccctccaagacagcgtcgccttcgactatcaattcttcttcaacctcctgcttcctccgattattctcgcctctggttatgagctccaccaggcaaactttttccgacatatcggcacgatccttacgttcgcgttcgccggtacctttatatccgcaatcgtgctcggtctggtgctatacctatggacacggatcccgctgagtgggctgaatatctcctttgtcgaagctatttcggtcggcgcaactctctccgctacggatccggtcaccatcttggctattttcaacctctataaagtcgagccgaagctctacactattatttttggcgagtcgattctgaacgatgccattgctatcgtgctcttcgagacggcacagaggtatcatgataccggcgcggctggctctttgacgttcttgaatctatttgaggccgtgggactctttttgctcgtgttctttggtagcatggttgttggaatgctggttggaatcgctaccgcgctgggtctcaaatacaccctcgtgcggcgcttgcccaagattgagagctgcttgatcattttggttgcatacgccagctacttcttctccaatggcgtgcatctatccggcattgtctcgctcttgttctgtggtatcaccctcaagcattacgcctactataacatgtcgcgtcgcacgcagttgaccaccaaatacctgttccaggtcatggctcaactctcagagaacttcatctttatttacctcggcctcgatctcttcgtggagcctaacctccagttcaaccccttgttcatcatggtggcagtgtttggtatctgtctctcccgatacctcgcggtgttcccactttccaaggctatcaattggttcattcggtatcgagcacgccgccgtggcgtggaggtccccgacgagttgccgttcgcttatcaagcgatgctcttctgggctggattgcgtggtgccgtcggtgttgctctagcagctggtctatcgggagtcaacgcgcccgcacttcgtgcgacagtacttgttgtcgtagtgctaaccgtgatcatcttcggcggaaccacagcacgcatgctggagattctcggcatccgaacgggtgtggtcgaagagcttgactcggacgatgaattcgacaccgaggtgacccatggcggaacctactataagcgctccggcacgagcctaggatacatcccgcgacgcaccgactcggtgatccccttggatggggtcacggccaacccacgcgctggacccggggagcgaacacacagctactccaccggaaacagtcgccgcccaagcccaccatatacccacacaagaatgtactctgccgcgtacagcaacaaagatcaatcctggcgcgaccgccaatctaccgcgacgttactcaacggcgcagctggaccgagtgctggggaaggcagcgacgacgagttcggcctgccaccttcaggcgccagtcgttccaacgatcacactcaccctgatgagttcgatcttgaaatcgagggcatctctgacgatgacctcccgccggctgcaaacggagcctcacgtctccgcagatccgcctcccagccccctcagccttcgaccgtcttacccaccagtgccgcggcatcgaccagcgtctcgcccagtcaccagccagcgggtatgtccgcacgggatgcgatgcgggggctgttttcgggtggtgcttcgggcgaccatgcggcttggttccgccagctcgatgaggactatatcaaacccacccttttactagaccagtcgaatcataagggccctgggcctggtgcggtttgagatgatgatacgttggaagtgacttccattttgttttgtttgctgtgggtgtatatttagccttgggtctgcattgtcgatgttctgcttttctgcattttggcttccatccaaagcctgattgcttgtatgaggttgcgtaaacgaaccccggtctaaacttatagaagtcaacaagatcttcaagtgggaactacaagtaccctctgtaaagtaacagtcatagcattggttttccaaggttctccgcactttgatgttgcccgttaccccacactcgggatatctcacctgtaaagggaagatggtcaaaacacccgactgagacaatccaaaaagcgtaagacgaaggaacaatccctctgtctccgtcgatggcgatttaataaacgtaacaccctgcgataagcaaaagcttcgccctgggtaggtacagccgtgcgttcctatctcttccagccttatcgcccactcggatgagcgacagctatctgcgctggatggcgtaggtccgacatacggcaccatgcttgtttcgggcacacttacgcccgtgcctatcttcttgtcatctgatccctatattagcttctgaggcttgcggttgtgctggtatgttttcgaaccggtttgcgccgcttttagaagggggctttataggagtagatgtcagcacggcttagtcttggtgatctgctaaggagtataggtaattacgatgctgtatggagtaactacatatacgtacctgggttgggtactaggcagtcacaagaattgaagcagaacagggcaatatgaggcccgcagatattgaggtgctaccttgcatatccttactatagggacatacattatgatcagtatacgacttgaatatgttggagtacgcagtagtaaagctgcctatcaagggcttttgaaaattcatgatcacctaggcaacctgtcaaacaacctacaatactctcagtggcgtactgggttctactcagcgatcaaaaggcagcaagggatgaaccctaagggagaaaacggaacgtttcaagatcacatacaagcttgtatttatgctttcgcgctccgctagtccagccgcctctaacctaagttggctcgaatatagaagtgatatgcaaaatggtgtcatgtacccctcaccgtgcagtacagatagatcgatctagttatcttgtagtattctagaattggaaggtattcaacggttatgtctatcgagaccgtggtcggatggcaaggatctgcgcttagaccttatcgagtcttgagtcggtgcttatagtacttgtgtccatcggaatattttgagacctaaacctcctatttttctttttgtcccgagggctctatttccatcgaatcttaggtgttcctcttcgatcgcgtgggcttttgtttgcctacccacgacttcatttcctctataaccattcctaccctagccatggatgatacaatggagaaagtgttatcccataaggtcaagaggcgtcagtcgacggctacaggtcatgactcgatgccccaggctggagataccgagttgctaggtgtgtataatccccggcttattggaaattggtgttacgatatgagatcttgtcactgacggatcaaacagcaacactcgggtacaagcaggaattgcggcgtcattattcgacgattgagatttttgctgtcgcttttagtattatggggcttttgccttccattgcatcttcgttggcgttttcaatgcccgctgggcctgtgggaatggtttgggtaatatactcctcagcctgaaattggttcgcattgtgactgacataatggatagggtatgcatctattctttcaggagtatcgtctggcaattgctaacagactccttggttaggatggttcgttgcgagttgcttcatcttccttgtggccttggcaatggtatgatttactccttatataaccctaaaaaccacagaactaataaccaccaggccgacatggcatccgcaatgcccaccgcaggcggactctatttctggacacactactactcatccgagaaatggaagaacccgcttagttttctcgtcggatacagcaataccatcggcctgatcggaggcgtatgctcgatcgactgtgagtcagatgcaatctcaaacaaaaagcccataattaacacatcctcatcagatggtttcgccaacatgctcctctcagtgatctcgctagcccgcgacggcgaatggtccgccacacgaccagtcatatacggcacatacgcagcaaccgtcgtcgcacacggcttcatcgccatcttcttcgcccggatcatgccgaggatccaatccgcctgtatcttcctcaacatcgctctcgtggtggctaccgtcatcgccctgcccataggcaaagcgaagaatagcccgcctgtcaacccgggcacgtatgtctttggggaggtacagaatttcactacttggcctgctggatgggcgttcatgctggcgtggctctcgcctatctggactattggtgcgttcgattcctgcgtgcatatgagcgaggaggcgacgcatgctgctcgcgccgtgccgctgggaattatctcttctgctggactatgtggtattcttgggttcgtttcgctggcggttattgcggcgtcgatggatacggatatcgaggggattctgaattcgaagtatggacagcctatgactcaggtatgttttcgtcttctttcttttatggggtcgtactttctaatctgggttctttatagatctactacgacgcccttggcaaaagcggtgcccttggcttcatggtcgtggtaatgattgttcaattcttcatgggactgagtattgtgagttcccgtcttaccatctactcgaaatcccagaacccattcactaatccacccacccaggtcctagccgcctcccgccaaagctgggccttctcccgcgacggcgccctccccctatcctccttcttccgcaaagtaagccaacgcaagttcacacgctaccagccagtccgcatggtctgcggcatagtactcgcatcgataatcatcggcctcctctgcctaatcgacgaagcagccgccaacgccctcttctcgctcgccgtagccggcaacgacctcgcctggctaacgcccatcctggcgcgtctgctctggggcggcgagcgcttcgtccctggtgagttctatacaggcgcttatctcagtaagcccatcgggtgggttgccgtcatctacatgatgtacgttattgttcttactatgattcctaccgaggggccgaatccgtcgcgtgagttctattactattcccggtgcttttgcttttgctgacagtctgtttgaagctcaaaatatgaattatacggttgttatcaatgggagtctttggcttggggcgttgctttattattatcttcatgcgaggaagacgtataagggaccgcagactactgttagtcccgaggatgagggcaaggctttggagcaggactcgaaatagttgctaagatatagatagacgtttgggtgggacttcggcccgataatgctcggtgaggctttgttaactattcctatagatcaagttcatgtactcaatactacaagtttactctatccccattggttggggagacaccggggatttcagttccaaattcagatcagatttggccttcaatatcgctaaaatcaccctttcaacagggctaataattgtcgctagacattaattctcgttcttctttattttttcgtttcttcatcatttcttcgtcgttcttcgtcgttcttcatcgttcttcgtcgttcttcgtcgttcttcgtcattccttcgtcgtttcgcaaaagcaattacccttctgagtctcattccagactcaacgcatagatgaggatgcatctattcaggaatctcgaggacgtagcggccaacgatcttgttttcctctggataacatagattagcatatggcatatcaagtaatcgaaacatccaaacttacccatgagcttgaacacctcaggcagttctttcaggggaacaaccttgaaaggagccttgatcaagccacgctcgtagaattcaatggcctcgacgccatcctggcggttaccgacgtagctacccttaatggtaaccatcttgacaacggtttcgaaaacaggggccttgaggaacgcatgggcgggaaggccaatggcaacaatagtaccacgagcgcgaacgtactcgacagcctgctggaaaggcttctcggagacagcgagcaagagcacagcgtgggcacctaggccaccgggagtagcagccttgacatctgcaatgacatcggtagacttggtgaaatcgatgtaggtctgcacaatatattagcatgatcccaaaaagttgtccggaatagaaaagcgtacctctgcgccaagctccttgcacatcttctccttctcctcgccaccgtcaatagcaagaacgcgcaagcccatagccttagcatactgctgcgcaagcgaaccaaggccaccaccagcaccaacaatagcaaccgtctgaccggggcgcgcaccggactccttgagacccttgtagacagtaataccagcacagagaataggcgcaatagcatcaagcggcacatccttgggcagcttcgaaacgtgcgctgctttaccaatcgcgtactgctggaatgtaccatcaacggtgtatccagacagctgggcatggggacacaaaggctcgtcggaggattcgcagaactcgcatgcgagacaggagccgttgagccatttgatgcctgcgtggtcgccgatttcaatgtcctgcacgagagagccctttgcgacaacaacgccggcgccttcgtggccgccgactaggtgatccttcacggtgaggggccagtcgccgttcatggcgtggagatcggtgtgacacacgccggtgtatcgcatcttcacgaggacttcatctgcgcccggctttgcgacggggatttgcttgtacacgggtcgttcgcctttatgttcgatgatttgcgcccattgggtctcggggatggtcattttggtcattttggtgggggtagaatacttggttaaatgatggaatatgtgtgaaggtaggaagaattgtctggaaagtgtttgagtgagagataatggtaacacaggaaaatacatgtcggcgcaggtgttttatagcaagcgcattgcctgatcagggcatcggctgctttaactccgtgagctcttcgaatccatccggttctctggtagattcggcgtatctctgtcattctcacacaatagcctcggaataccgtggaatagctacataatcggctttgtatccacttcggctcccgtttgcggtatacagtactccgtctacagcgcatggttattgtccgaacatctagaccttgacgacttcgtaactgtccatctctatcgccaccacatacccaataggtgtccggtgagatcgaagcatcactccatgtcagcttgtatgcatccatgaaacgggaacctgcccatcgaatcccatttggaggaaagacgaaccgcaattggatacagatacacatatgggaagaccgacgatcacaactatgacagaacatgtccagacattgtgccattccaaggttgtgctgtccacgtccatatggggagtggaggacgtcatctcgaacatcaggccatgcggcacgcggggtatggccggagatttagagatttcaagctgttcatggcgaggctataaatatcactgagatttgaatcagtatatataagtgtctcgaccttaatagaaatatggtttatattcatcccagtttccctcttccgggaaatgtcgatctgagattggtggttgacctgaggctatacatatcctttgactctttagcttggctattataaggttggttcttagtatatgcattatatgcatatacagatctattataatctattatagatctattgatgacatatgaaatactttatatccaacgtggtaggtttgagttataacttataagctggtagctctggagatgtctatgacccagacctcttatataccgacgaatccctatttagtaattctctgatgtataactagtcataggctaaacaagataaccagattgatcttcaatccaagctctaaaacataaaaacaaagaccgaccgactataatcccattgaatccaatagaactggtctccacagggaggtggatagggcgatctcacgataaactcggatcagcgaaacagatttcacgtcaaatgcgagtggaagcgaggactcgctaattatctgaactcctgcacttaggactagggatattcaacacttgaacgcattggaacaagacattccatgttgatgatgttcgtcctcaccacctctgtgctccacggggtgtttgtatggactctgagcgagatcggggcacaacctgggaattctcgaccagctagaaaagaaaaacgatagagaagaacacgaaaccattgaaaatagtcgtctaaaacacagaaatcaccgctttccactgtaaaaagcccgttcggatctaacccccgggatgccggagttggtgaaataccccagacgaggaagagattcacgagaaatgccaaatctcgtcaactttttccccttttacccttacgagtcgtcgtcttcccctctttcacccgacttcatctttcgtcctcagttattcctccattcccccattcaccccatctctcccttctcatcctcaaccaccgcccctgcatcagctcgcctaggcccgcgcattctctttcttgggctccacggaaacttcccttcttcctgcatcttcccaccacaaacgaatccatccctccatcaggtatttatggctcgctttcttcctccatctcttctctttcatccctcttcactccgaaacagatcctacctgaaaccaacaactgacaccgcgtcactagaacgccggaacccccttgacaggtgtctctgagcaggggtcttggactcttcttcctcaattcccgccccgaccctatctcgacccgagtgaccaacctttgacgcgctcgacccgtaaccggggaccgcggccatcatgacgggccctccgccatacaacgcccagtccccgactcagcagcagcggtatccggcttacacctctccgaataagaaccacccgtattacccaagcaatgaaccaccgcaaccgccgcagcagtaccaccagcatcctccgcagaccccacccgcatttggtccatcctccgtcgcgcgaagcccgcacttttcgcacgcgtccccaatgccgtctacattgccgccgcccttgaacgggagtgcgccacatcacccgtcgcacctggagtcttcgcaataccagggacattcggcaccgggttctcagctcccacttccgcgcccttattctagctccgtgatggcgggcaacggtgcttcgccgtatggatctgcgacaccacatggacatccgcccagccacccagaaggccattcgcaatctcccaccagggagtccgaatccccatatcggatgcgaggtaatggtatcggatatggacctccgatgatgcgagagccgagaccggcctcaccgcaggaagccgtacgcattacccggacccttgcaatatctgctggtttactaactcatccctgcctcgcagaaacccgctcgagccgcagaccccatgtcgttcgccagtattctttctggcccgtcggacgatcagcctgcgagaaagccatcgcctctcccggtccccatgatctcctcccacacgccgcatgctccccctgtctttatacaccggcacctggaacacactacacctgtagctattcatcacaaacacgagcaccgattagactttgatagacacatcgatggcccgagaccaccacatgcgaccaatgggttcgtcaagcccgatgcggaatacgctgcacccattcctcgtgcaccgctccgaaaaccattccctcccggtgtggatctggagcaggtcaatcgggcttcagccgagatcgatcacgccgagaagagcgacgttgaagatcctggcttcgacgcagaacaagagcggtatcgggagaaaggctacaaacggtcgttggaaagcagccgcgcagaggaagtgcgacgaaaggtaggtcgtctgaaagtcgttccatgtccagtcaatcccatactaacatatgctcagcgtcgccgcaacgagttcctcatcgatctaggtagatccttcgaaagacaggccattcttggcaccgaaagattccgagtgctcaacgagggtgctgtcatggctgaagttcaacagaaggagatccaggatgaaaaagaacggaagaaggacatgcagcgcaagcgccgtcgtgaaaacactgtgcgccaagagatgcagaagaagctggaggctgagcgcaaggcaagcaaggcccaggaacccggagaaagggccaagttcctgcgcgaagccgagcgggcacagaagaaaatccgcaccaccaagcgcgctctcgaaggcggcgatggccaggatgagctcggtgaagtcaccccgcttgctcccaatctcgaaggcgggacgaccagtcaattccacatcggccgttcctcgcccagccgacgcaggtcgggccgcgccggtcctgtcactcgtcccaagaagtccaaggagcagaagcaggccgagaaggatcttgccgaggcagcttggaatgctgggttggacgacgagctgtatctcaccccaagtgcgagaaaggatgttcgacgctcaaaggagggtactcccatctcgcagctacactacgacagtaaaggctataaccagatctacgagcagatctggcgcgatatcgcacgcaaggatattccaaaggtctaccgcatcaaaacctcctccctctccacccgccaggagaatttgcgcaagacggctcagctggccagcaagcagtctcgcaagtggcaggagcgcacgaacaagagcaccaaggatactcaagctcgtgccaagcggacgatgcgtgaaatgatgtctttctggaaacgcaacgagcgcgaggaacgcgacttgcgccgtgtggctgagaagcaggagcttgaatcagccaagaaagcggaggccgaccgcgaagcaaaccgacagaagcgcaagctcaatttccttatctcgcaaacagaactgtactcacactttatcgggcgcaagatcaagaccgacgaagctcaaggggacagcgttgttactgccaccggagagaccatccaaccgggcaagccaaatgctcacacaatcaatcttccagacagtgtggccaaccctaacgccaagaccactgcattcgaggaccttgacttcgatgctgaagatgaaaccgtgcttcaacaagctgccatggctaatgcgcaaaacgctgtgcaggaagcccaggaccgtgcccgcgccttcaacaaccaaggagagggcgacaatatggctgcatttgacgacggcgagatgaacttccagaacccgactagtctgggtgacattgagatctcacagccgaccatgttgaatgctcagctcaaagagtaccagcttaagggtcttaactggcttgtcaacttgtacgagcagggtatcaacggtatcctggcagacgagatgggtctcggtaaaaccatccagtcgatttctgttatggcttacttggctgaggtgcataacatctggggtcctttcctggtcatcgcgccagcatccacactacacaactggcagcaggagattacaaggttcgtcccgaacatcaaggtgcttccctactggggtaatgccaaggaccgcaagatcctgcgaaagttctgggatcgcaagcacatcacgtataaccgtgactcggaattccatgtcctagtcacctcttaccagcttgtcgttcttgacgcgcagtacttccagaaggtgaagtggcagtacatgattcttgatgaagctcaagctatcaagtcctcttcgagttcgcgatggaagaatctgcttgggttcagctgccgcaatcgtcttctgttgaccggtacgccaattcaaaataacatgcaagaactgtgggccctgcttcacttcattatgccaactctgttcgactcccacgacgagttcagcgagtggttctctaaagacatcgagtcgcacgcccagagtaacaccaagctcaatgaggaccaactcaagcgtcttcacatgatcttgaaacctttcatgttgcgtcgtgtcaagaagaatgtccagcaagaactcggagacaaggttgagaaggacatcttctgcgacttgacataccgccaacgtgccttgtattccaatctgcggaaccgtgtcagcatcatcgacctcattgaaaaggctgccacaggcgacgacactgatagtagcacgctgatgaacttggttatgcaattccgcaaagtctgcaaccaccccgatctcttcgaacgtgccgaaacaaaatctcccttctccgctgcatctttcgcggaaactgcatccttcgttcgtgaaggaaactttgtcgatgttcgctattcgactcaaaatttgatcgaatacccgttgccacgcctattgtgcagctctacaggacgacttgatcttcctggttctgataatccccgtgtgggcttccaaaccaagtacctatcccagctgatgaacgtctggacaccagaaaacatccagaagagcgcacgtgacaatggtgcattctccttcttgcgtttcatcgacacttctgcaggggaagcaagtgagatggcacgacttggcgtctacgaacgagcagagcgtcgtcgcagcaagccaaacaggctttctgccttgaatgtcatctatgatgagagtgacgatccaaagaactcggtcctatcccattcgatgttgaatattgttgatcgtaatgatcaacaggctgtgcgagatgtcgccattgagggccgaatgaaggatctcatgactgtttcacgctcctcattcgaagatcaaggccttcaacttattgagccttgttctagtcccaaagcctcggcgcctcccatcaccatgtcctcttccggccaacagacaacacgggaaacttaccaagctttgttcaatccctccgttcgacaagcactgtctggacactgcagcaggcaacttgaggagcagatcctcatcaagaaactcgatcctacaccttactctcacgctcctatgctgccgccaccggtttcactcaagggccgctacagccacatcgaggtaccatcgatgcgtcgtttcgtgacggattcaggcaaactggccaaattggatcagctgctgcgggagctcaagcccggtggtcaccgcgtgctcctgtacttccagatgacacgtatgatcgatcttatggaagagtacttgacataccggaacttcaagtactgccgactagatggaagtaccaagctggaagaccgccgcgacacagtcgcagacttccagtccaacccggatatcttcgtcttcttgctgtcaacccgtgccggtggtcttggtatcaacttgactgcagccgacactgtcatcttctacgactccgattggaaccctaccatcgattcccaggccatggatcgcgcccatcgtttgggccaaactcgccaggtcactgtctatcgtcttatcacccgcggcaccatcgaagaacgcatccgcaagcgtgccttgcagaaagaagaggtgcaacgtgtcgtcattactggcggtgcttctggcggtgtcgacttcaacacccgtgctcgcgagaaccgcaccaaggacattgccctgtggctcgccgacgacgacgaggccgaactcatcgagcaaaaggagaaggaagccatcgaacgcggtgagaccctcggcgccaagggcggaaagaaggccgctcagaaacgcaagcgggatcttacgctggatgacatgtatcatgaaggtgagaacactcgaccactccttgttatgttttaacgtccatactaatcgattacataggcgagggtaactttgacgacgccagcgccaaaccctcaggggcggctacgcccgccgaggaacctgtcgaggtaccttcagcaacgcctgcaaaacgcgggcgcggccgtggccccggcaaaggcacgtcgaaacgagctaagaccacgaaagagcgtcttcgtctgattgacggcgacggcggccttgattaatccaatgactgtcaaataatgcaactcggggcggcgttcaaggtcacagctacttctcttattattttcttttgtcgattggtcaatccaattcctccttatcttctactttccctctttcccagttcttcttatgttctcaaatggcagatacatgaactgctctgtattatcatacgaaccttgactatgttctgaaacagcgacgtgggctcagtatggacatttcccaaacaaagtctagtggctgagggtggttgatgcaatgatgaaaagatgattttctttccccctacgatagactcgatcctggcttttgctttggcttgtggctcatgggtggttgtggcggtctctgtgaacttggtgtgatttgttctttctttttcccccattctacattcttccccttttttccccttctttttctattttggctttcctgactcgcttgtatgttcaatgttcaaaaagggcgcgagtgttttagtttggttatgagtgtcaatgtattggtttgatggactcctatgcccttggtcttggtttgttcttgaaagaaattgtaggattaggtcttgtagtgaggtgtgcttctaggtcaagaatggtgatggttgatggtaaagttgtatacttagcttgccagccttgctcgtcattcagctctttgagcttataatgtcccagatactaggaagctatcatctatgtacatatggtgggcttgagcgaggattgtaccggtagccctcctcttgctgatatcagaagaaacaaacatgatgcctcacaccaaagcgaatgccagttctcaaacaagtcagccggaaataagagacgccgttcctgcccctgccctcatcatcacgttaccatctaattaagcgagcccacgtcgttgtttgtctcatttgtgaatagtggcataaaccgaccgcccttaagatacctataagaaggcagccctgcccccagaccttcctcttcttttcttccttcttcagctcctctttgccttctggcttagatcttgtgtagtatctgttcttgtcagcttaatctctgatagtcctgcattgcgggtcattcatgattattctaatctttggacctcgcgacttggtctctgtgcttgcgcatgcctcgttgcactgtgtcattgggcttacactacccccgattgatgcgaacttccttttttcatcaattgttcggcttggctgggcgtttggagaagatggctgtttgggttttatgttcttgtcgggtgggtccgttgtttacattgttgattaacagaggtcaagaatactgttgtttgaagttcctattacatgtgtctatcaacttggtccttgttgtaacttactctcatctcagaactggaggtggggagaagatagctttgtcttggggtcgagatacgatagctctctggtccctctctcttctcgtctccgttccttttcattcctagaatgagtacattgtttctctaactgaactacagctactgactatctggtaaacacgatcttgacacaatggaacttccacccttctctcggggtcaaacccgtctttcattaatctgtggcctccgagggacaagtgatgatgctgagatgaaattacgatgaacttatccacaaggagcataccagttctctactgggtgatggaaatattatcccaatgatggtaagcatactatcttctgccttctgttgctaataacttctggcagaacacaaagcaaacgcgatttcttctttcctccccgtcacgctccatcgccccaatattcctccggcagaacatccatctgcccccatcaactgtcccgccgggatactggggtgagtatgagaagacatagttggtatccttccaccgacggggatttctcgcatcgctgaacgaaatcggaatcaaaaatacattgtcataccataatcagacagacgatgaggggtgttgcccaagaaagaagaggcacaccaatgctcgctctcggctttgcctgttcgttttgggtgccaggaggaaaggaagagggaggggacaagctatctacttctagctaccgtgtgggatctgacagaccgaaatctgccatgtctctcgcggggagatccctcctgcgcaattgactatgctcctctggagttatcgagctgcaggagatacctcttccttcagaaagtgagatgaactactacaatgtaggaaaggaatccacgagagattgatgacatttgtaaaactaggataacgatctctcctcccaggatctgtccccactttgtagcagtaagcttagtggggggaagatagatgatgtattatgacctccttggtgaggttaactatgaagctatgactaagctaagcttgtgacactgggttcttttctaatcgtgtaaccaacacattccaacatcgaatgttccgcttggccactgtgcctgtcttcctgctttttcttctggtgggggacaagtttttggttggctgcatcttagtgtaggtccgggagagggaaatagctgacacagcaagaggttcccttgtcgtggtctaggcagtgggttagttcctcataggaagagataacattttgaaggtggaggctagcttacggaaccaggcacttttccgtgtctgctcagccaatcttggaagaacaaaggggggctgcactcatctctttctcacacaagatcctccacaagatcctcgagctagatggggttctcattcagccatatcagcaaaccccaccgagtatggtgcgacgattcgaggtaaatctccctcaactccgccgcaaattcgtccagctctatagcacgggcgcggtcgtggcgagctgggaaatagctccaaccacacacacaccaacggtatagtggggatattatttcgacagcatttatgtactgccatgaaatcctcaagacagagaaatcttggaggccttttgtgacattcgagggtgactgccaccaaccaagaaccatgtattcctgcctcaaacaattcggcaaatgttgagatgcggaacttctcatgaaattcggggtttcgtggtatagagattggagcggtgctgtgagaggaatcttttcactgctgaacaccatgcatatagtcgttcaggtcgcttgggtattgtgtgatggtgactgcgacaagaacggtaaatggctttctgtgctgtatccgagtgcatttgcaaaaggccttcattttctttatttgagcctctgtgactgccaacatttcttctgtagctctggctaaacgagcaccgatggacaattcggtatcgtggaatgccccgaagctgcgcagatgagaagacatgattgttgttgagaaacaacccaggaacaaggagatggaggaaggggatgcgtgccaattggttctgatgtctccattgattacttccgtataatctttgatcactcgggaaatttctctcaataccaatcggcttcagaaaccttgcacttgggggtataggttgcgatccgggtcattgacgacttcgagagtattatcgctatcattgaagctccatggtatcggactgcggtacgctttcgccactggcagttggaagatgaccgtgtgtggtcataaatatatatataacttatagcgctaggaatatttgcaactaaagttctaaatttggcgccttggtaaaagttagtcctgttcacaatgagtacttcaagataactgatctggaagtgagacaaaagcgaatggaatctccatctgagcgagagatactttcttacctatgcgtcatctcgcttcttcaggggtgatagcatcatccttctttcgtctctcattcccctattctctgggatcgggaaagggacatcatgtcttggcagttcatcaccattagcaatctctggcattttgagtcacgatatgataaggtaagagggagcgagacagaaaggctatgatgaaatataaataggtcgagcttcttcaggtgttgccgggatgaagaagatggtctatgggcgtttataggcataacttataagcaaataaggcaataacaaacaaaatagaagtaaacacaggtctgagaaaggagacaatcggatgtccatttcttttctttttttccttcctcttctctgctctctttcatttcgaccgtccgctccgcactactacagtcccagccagcactccattggccaagaaatggatgcccccaacgaggaacattcgcgaccattctgaggttacgaaccggacatctccacagagtgcgatgagatcaactcgcttgaaggctgcagcaaccaccagaaagcccgagagccacctggatacaccgtacatacaccgtacgcccgtgagatcttgcggatgcacaaggaagtggtcgcagcccgagaagagtacaacataaagtacgcttctctagaaaccagaatggaagttcgctgcatcaggtgaccttgggcccctttagccagagatacaatgcatcatcattatcttccccggagctttgtaccgttacagctcacttcgctttgacatatccctacctcaatacttcattgtcatttctcattgaattctcgaattttcttatattctgccccctttaatataagcccgcacccgtaattcatgtaatggagccagaatagcgaagtcatcttcattaccgatggcgtgttgatgaatatcaacccgcttagggacgggctggaatggttggcctaacgagttcccgtcacatttttagctacaagtctcgtgagagcctgttagtcgagtctgtacagtttgtggttagatattctgcggtgggattctatggagtgtaatttgcgttagttgattggtttctacggtacaagacgctggtgcttaccgtgagcattgttaggttttggaggcgggggcgggggcgtcctcaggtaagtgatgaagatcaagttcaaatataccgtaaaagggtccgactgattgacacaatgattacaagcttgactttaccctaaacttgaaagatgttgatattgtaggtccacatggatgagtggggttgttgttgttgttgtattatttcatgtccatcgagatatgggcgaagcccgtatttctatgacctcccatggggtatggggacgtgctaagctatggtattatgtacaaagttgtgcgcctagagtaagcaactccttccaatgaatgatctggctagaggcctgtcagctgcccgtccttctccgaactgtgaaatggatgtaggatcttccgaatgcggtttcccgcctgccgggacggcggcccggcttgcgtctgttcttactgcggggtgcagttggtgctttggtgacggggtttagcccgcctgcttcgcgaggcagtatgccggtggatgagtagagtgttaggaaaatgttcaccataaattatagtccacgagtgtataagaacactttttgtagctagatttctttctatttcgaattacaaaattgatagaaagtcaagatgatatgctgaagaaaccaaatatgactttgcttgacaggattgcttgaatgtagcccgggattacgcacttacgtacttcttacttgcagcgcagtcatttatattttgatcctgctttattatgtctcatttatgctaagcattgaccacaagctcaagcatatttaaacggagcaccttaaacctagtatcataatagtcaggcctcgttgagatttcggagagcacacgctgtctgaagtggcgaggcgtttagggttatccacgcaatgtgtcatttttcatgattatataatcatgcaaaatctggcagaatttagaatgaagtggacggtgagcacgaccccactttggcaagaaaagtctataatgtggagtacaactagccctaatcaggtagtcttggcgccactcactaactatggacatatggtatgatcgtagaacaccgatgccgggccaaattcacccaaaagatcggggtttacaaaaaagataacggggatctaagctgacggggtttgactgcaacacaagttgccgtctcccgcaaagcccgcggtagtgaggcacatcgggaaggaacatccgtacctcgggatttgcctcggcaggccaatcggagtctttcgtatgtaagccatccggatcagtcagcagccccaattgattttccctctggttccgccggctctcaacattgttaacttgtgcaatctcctaaactcacggggatttttgtgtttggcttcttttcctcttcatctctttggctcaattcaactatggaggctcttttgcaacagtctcgcactatgtgccctttcctcaagcgcacatctcccgccaccctccgcactctctcaaccgctactcgtccctgcactagcccgggcggtggaaccatgtccaacctgcaggttcttggtcgccgatgcccagtcatgagcaaggctctggctgtgcagagcgctcgtctcagtggtgccaagcgcttcacctcgcgcgctgcgggagtcgcttccgtccagccattgcgggttccgactggcaagcgggcgttgcataccaccggtggtcatcccgccagtctcgcctctggtggatacgagaagaacgatcgaggaaaccctaacttggccacgctccgctcgtcccctaccgccgccagcgccagcgccggggccgcagtccgcggtccccgcccggaagcgccaaccaacgaaaggttcaactacgacgatttctataacgtggaattggagaagaagcacaaggacaagtcctatcgctacttcaacaacatcaaccgtctcgccaaggagttccctcgagcccacactgcctctgttgaggagcgtgtgactgtctggtgctcgaatgattacctgggcatgggccgtaacctgcaggtcttggactccatgcacaagactttggacacctacggagccggtgcaggtggcactcgcaatatctcgggtcataaccagcatgctatcgctctagaggaaacacttgccaagttgcatggcaaggaggctgcattggtcttcagctcttgctacgtggctaacgatgcaaccctagcaacactcggtagtaagatgcccgattgtgtcattctctcggacagcctcaaccatgcctcgatgattcagggtattcgccactctggcgcgaagaagatggtcttcaagcacaacgatatggaagaccttgaagccaagttggcctcgttgccacttggtacccccaagattattgcctttgaatccgtctacagtatgtgcggatcaattgcgcccattgaaaaaatctgtgatctcgccgaaaaatacggtgccatcactttcttggatgaggttcacgctgtaggcatgtacggcccacacggagctggtgttgccgagcacctcgattacgatgcgtatgcatcgcaggatacagccacccctcaaagcaccaagggcacagtccaggaccgaattgacatcatcaccggtaccttgggcaaggcctacggctgtgtcggtggatatattgcaggctcggcagctatggtggacaccatccgctcccttgctcccggtttcatcttcactacttcgctcccaccagcaactatggctggtgcggatgccgctatccagtaccagtcccaggaaccccgggaccgaattcttcaacagctccacacccgtgcagtgaaggccgctttcaatgatttggatatccctgtcatccccaacccctcccacatcgtgcccctcctggtcggtgatgcggagctggccaagttggcctccgacaaactcttggaggagcacgacatctacgtgcaggctatcaactaccccaccgttccccgcggcgaggagcgtctgcgcatcaccccaacccctggccacgtgaagcaccttcgcgaacacctcgttcaggccgtgcaggccgtctggaacgacctaggcctcaagcgcaccagcgattggaagcgacagggcggtttcgttggcgttggcgttgaaggtgccgaggccgccaacctgcccatctgggaggacgcccagctgggcctgaaggctggtgagaccctagagaccgctgtcgctcgtgagttcaacgacgcagcttcccagaccaccgtgctgcccctgaaggctgctacccctctgaccgagaaggcttactcggcagtaaactccgctcccgttggtgtggttgcctagagcagacgaacgccgtcttttacgcttctcggtttttggggtaatagctacattattcccgtccattcatttattataatattgtatcgtacggacataacttgacgtatgcatccgtcttcaacataccacatattgatgtcatatcaactgtctgcctttattcaaatgatgtagtcatcttacagcttggattggccgttaattgcgcttttgtctgttgatgtatgccattgatttggttggcaggaccaagacggatgtcggatatcctgcctgcatctatattgatcgagtgtcatttattgggctcaagtgtaacaggttggaatgaacagagttgaagtggtattttctttgcatttcatgtaggcttcggcttgtgtagtatatgttgtaagtgctactatggaaatatggaaatggccagtagtattagggcactgatatatatattcgccttggatttgaactgcctccactcaattgcaaagaagcaatttcaaataagtttattttggatttataagtctttgaatagaaaaccaactggaaaaccgggcgaatcaatctagattctgctatatatgctagtagtgaaatagtataacaatttgtataaatactaacaatcgggcaaagaggcccaaaagtccacacagaatcaaagaaaaacgaccaagtaaattcatttggctatgtaacaacgtctcattgatatagaaacaggtagaagtaacaatttttgaaacacacaaaagcgccatatattcaaggaagcctgacaactcaagaccgacaaaccaatcaacctccctacctccgaccaccacggctaaccttagggaactcaacaggcacgcgcaagcgagcaacacgacgcgcatgcgcctccgcacgtccacccttaatattccacttggcgaactccgtctcacgcggcttatcaatgcgacaaccgagttcacggaagtactggtgaatagtatttggatcgagacgcagatcatcacgcagatccgaaggatcagtcgcaagctcgttgggcgcattaccaccgagcgagctggagccaccgtcgcgtgccggctggggcgggatatgcagcgagagcgcacagatggtagtttgcaggagggtgaagtcgttcttggagacgtagccgccgctgggcgcgaagcggcgacgcacggcatcgatcacggactccggaagcaggtctgcggaagcggcgtccggtgcagcggcgccgggcttgggcttcgtgacggaccccgtggtgtttgacaggatgcggcggaggtcttcgcggggtgggagacgcttgctgcctgggccgccgcccttggcgttcgcgcctgcgtttttgagacagcgtccgaactcgattagcagctggatgaagcggaggacttggaggtgggttatgttttcggagttgacgactgcaccgacgcggttcgagacgtagcgtgagacggttgtcacgccaagaccggcttccacttgtgacttccactcgtctacgccgtttagttggctgagggttgagtggctgcctggaacgagtgtctcaattgtgtagacgtcggaggggtgcgagacggctaggttcggggttgggaggggcttggcggcttgcacttcggcttgcatggcgagggccttggcgaggccggaggctgtgtttgcgggcagcgaggagatgagggctgcgccggcttgggggacggcgccggtgggggcgttggagagctgggcgttctcggccatggattgcacggccttgcgggattgtttggttccgaaggtgtttgttagagctgtgcgttgggcgcgcatagtgttctggtgctggttgttagttggatgccgttgatgtacggacttgcggatcgaagggcataccatctcttcatctgagtcgtcctcgggcttgcggcttctcactgctcctcgcagtgtcgctcgccgcacctccacgactttccatgtcttgcgctctgggtctataactgcgacatagtgcttcacttgggagtcggtatcatctcctgtgccctcacggccgacaaagtccaacttagggtggtctgaggactggagcagtatctctgaagagacaatgcccgggttccgagtcgatgccgcagacttggagacattggcgcggtttttgatatatggattccagtggagggatttcgagctttgaagaccaggtgtgtcgactgtaacgcaagaattcgattagcgatggtttacagcctggatgaaagccttcgactcaccaattaccggtgccagctcgctcttatcttcaacaacgctggcggccagcgggggcagctgctgcagcgcgggctttttgcttgggcgatcattgcctgatgaacgcttccgcttgtgatctgttttattggacggcattatggcgttaaagacgagagacaaagattgtagctctcgagaatcggctctagcgcggtgaaataaaatgtctggacttgtcgggcagaaatttttacgagtggagacctggcaggcggtgagtctacggcttaccgcacacaaaggaatattgacgtagatggagcgatcgcgacggcgatataaagagagctacgaatatttgagaacagctgctcgagaagtagccgagctccagtttatgtttacatctacaatgagtaagaaaggttgcactcatcaagtcatcgattcatctgcagtagctaaaccaagacctccgagctattccatggattttgataaactcccggaaaaaacctctccacaacttttgaccagcccgaagaaaggccgtaaagataatgagaattgaccagtcaccccaatgccgtgctcaaagaccgatggtttgcaccggccctccaacatccacctaaacacaggagcccctccgggtaataaccatgcatgacatcagatcgtagacgtgaatgaatccgaggtgttggaatgtgggtagactgttgttgtaacagcggattccatcaattcgatctgcgatttcgtcttgaagataggccggaaatcgtatccgtgcaggtaactcgttggaatgaggggcgtgtcgcgaagaaacgaaagtcgcaatcgcgtcgtcagttgtcgtgttcagcgttcaaacatgagctcgagcaaagagggctgagatggagggggcgagtagtttatttgctggtttggggattagcatattggttcggcgatcggaagctcaatggccttcacaagaccatcggcgcataatggaatgacttacgatctggcacgcatctttctgcgcttgcgcttgagacgacgtgtgcgcttctttctccacttagctctcatcttcaaactgttgactggttagtgcattgcgctcgaggaaaccttaagcttcaggaaagctacttacgatttcgaggatgaaacagagatagtagaaagaaagatgaagtgtgggcggcccgagacgcatttacgtatggtgcggctgactcagctgcgctcgcttaggtcacacacgtgacacttcaagcttccatctgtgacgacacatgactatgcccgattaggaaatttgatagggtttccctccatagaagagtttaagattacagaccatttgaaaataattgatgtcatacgaagcacgagtgagggttttacgatgggacaattaaaaattcacgagaagagcaatgccattactattattgaatagtatatcaagtaaccatcatatagctccgaaatcaagacttttgatgcgaatgtttcccaattatagccaaccgtatgttcgttaaagaaatataccagaatcgtcatcactcatggagtttgcaagatccgcacggcgagatccacaaaattaaaatgagaaaatgtccgccatacgaaagtagctatccaaactggatattttctcagtacgtgtaccgatatgtgggcgccaagtcgccgagatattcctcttcgtcgtcgggaatcgtagcaggatcaaccgcggcacggtcacgttttctgttctcataccacagggatgccatgtagctcgtgcatgccagagcagcgaggcaaatgaatgagaggcatatgatatacccggttcggaaatccgtgacaccattctttacaacaaaagaaaaagtagcgatgattccaccgatgttgccgaagccaacctgccatgcggttcccacgctgcgtcgatgatgaccacccaaattcatggcaaaccagcatacaatgaccggcatggcgctgtaacagccagaggtgagcaggaacagagcgccatattgcgcatgagtattgttgtggattgtcatgagcataataaatccgacaagggcgatcgccattggaatcaaggtgaaagcgaatcggtgtcgcattcggtcagagcaaaaggcgactatcattgagaagccgaatgctgcagcccagggaggaatggagtacagttgtgttttgatcgaactatagccgtaggtctggataatcgacggcgcgaagtatgcatatcctgtatgagagtgagcaataattcgcttaacggaagatggaaatgttttacgtaccgtaagccgggacaatcaaaccgaagtacatgaatcctccgataaagaccttgtctgggaaaagtcagtgcactgcaaatgaatgcaacagggattctcgggctatacttacagtctttgaacacaccgaggacctcacgcttgcccaagtgaacgttgtgagcagccttgccgacatccttggccaacttggcacgcatgtatgtgcgctcttcctcattcagccacttgacatcctcggggaaatcagcaatgaaaaagaacaggatgatcgcgaccacactggtcaagacgccctcgataatgaacacccagcgccagccactgtagccacgcatgccgtccatctttgcaattccactggcaagcagaccaccgaaggcgccggccagggaagtggagctgaagaagaaactgaaacgcttttgagcctcagagcgtgtgtaccacatgcccaacaaatagaagcctggcgatcacaattagcacctgtcttaggatgtactgttggtatttgctcttacatccagggaacatgcccgtctcaaagacacccaaaaagaaccgagtggccatcagtccaccccagttctttaccagaccctggaagagcaaggtcaagccaaacatgaacatgcatgccgacactaattccgaattagcaagtcgccctcaccaattgcccctaaaccaagggcgcaaagggaccaaaacacttacgccagacatggggcttcaacttcttgagcaagatgtttgacggaatctcaaagataatatacggaacgaagaaaattgtgagcgcggtgttatatttcgttccatcgacgatgtccaaatccttcttgagtccgagaatagcagcattgctaatattaactctgcaggtcgatgatgtcagatataagcaacacctggtcacacagatacacaatggtcagcttaccgatccaaaaaggcaagcagatacaaaatgcacagacagggtaggatgtgccaatcgaccttggcttgcaacttgcgcgcggtggtagtcgtgagaggaggcagatcgccgtccgtgtgggagctgacctgactttcggccgcgtcgatgtgctctttgctatagcggggtgattctgcgcggggggagtaccttacggtcagcatgtgttgacaaggatgtgctagcgcaagcgcgaattggccaaaccctaacaaggacggggtatatgtataggattgaacatacctgtgacacccattgtgagatgcgaatcgcactaggacactgcgcgcctgcttggaaggacaataataatggggatgatggaagggaaaagggaaattttgacttttaaggctcgaattcccaagcgcagctcgccaatgcagggatgttaccgaggtgctacgctcgatgccgagtctcaaacgtggggtaacttccggagttacggagaggaaaagcaaagctgaaaaagcgagtggtcaatcctggcgacttaaaaagattcgagtcacagggcgaatcatccctggagatatccccggacgatcgaggccccgatctcggcgccgatatgcattccgcgattttagtttttttagtttctttagtttattaaattttcactttgcacttctagttccttattgattcggcagaacctcgggaggagacaggtgtatatagctttcatctttcaaatcttaattcgcccttcccacggaggactacatgcttagaattcaatcagtcgtttccccgcaaaatggcttcaagatcacgtgattcatgaacaggggtacaccactttaaatgtgaatatccacttagccaccctgggaagtgcgggggggtttggtatttttgtatctgctgacagtgactcagaaaaagtgttgactcatatttttattgctttctgatacggatatactggccgttgtttccaaatttcgactagtagagaatcgaattgctagtactccgtacaacaattaccagtacggagtagaatatcaaccgaggtgttgacctttttgcggtgtgactgtatgagttggcgtattgtattgtaacggcggaccaatgaattctctgtgaattgcctttttcaggttagctttaccgcttccggtttagcggctcaataccgtacccttcgatcaaatgaccttgcccagtctctttttcttctccaagggcatcctgtagcatttcacgagatgcatgctgctcctgcatgctgctccgttcacaaatccaatacatcatgtcaagtaagccttctctgggcctagccactccgagtgctagcttatatacacttgaattactatcaaccagccccagccaaaaacagaattcgaaatccccaaggtcctcccatagtagtctcatgtccctctcaattcgtcggtgtatttgatagcacgtgcatatgttccatattgaatccaagctccatgggcttacccgaaataagtaggcgaaggagtccgcttctccaagtcttggcagaaatacttttccgaagagaaaggctcagaggagtggtcccgatccacactgtaattgccgtcactattgattatctcgcagttagtccacaattggccctcgaggttggaggctgcttcgtggttgtgtgctttgctgattggttccttaagtaacgcctccgtatgtgtgatcaattccgtaagcgtgcgatattggttgtgccagcacttgtcgatgatatcgtcaatcagcggatcatgatcgagcttcggaaaatttcatgtcctggagtaagtccatgaccttgggtccatactcgtaaggatcatcgccaagacattgattgccataaacctcaaatccatagttgatcaaatagtatagcgaaccgagggcgaactgctctgttcgagaacctagaaagccggcagttcctgccattccttggtctgcttcgttactattaattagtcttcctcacggacaagggcaagtttcgaaatctgttgcaaactcggctgtgcaatcaaaatccgacagtttagtcggttacgatcaagtaggatgttctctggtcgcaagtcaccatgagcgaggttaagcgatgcgagaaaagcaacactttgagcaagatcgttcatccctgggtgcataagagatcagtgccttgtaaagtgtatagaggaaacactgcactatggagggacatggtggatgccgggatataatcttgtagattttgagttctttgcgaaattgctctctctcttcctcgccggacttaggaaccttgaccacgattagaggatgagcctcatagacgaaggagagatgcctcctccccagatccagtgcacactagaaaatcgacgttggatatccctaacaagaaggacaagaaaatatacaaatccgtgtctactcggaggagaagtgagaaacgggaaggagacagggggcaatcagccacgtgatcgaggccttcttccttagcgagctgtaggaatcgaccgacatcttttctctttcacttattagcccccatttccgaatttgtcgagaagtacctatgcagtgaagacggaaagcccaaaggtggtttataagcgggcagacagaggatttaagaaatacctaacacgccctgggaagtaggagaaaggtatgattcacaaaagtacaacgtagtcctggtagaggcgaataagtgcgtgcgatgtgaattccaacagggatatccttgtatggcgctggaggatcgacgcgaagtgggcctttttcaaacaaagagaatcaggccgcaaagtggtttatatttttaagggagattggagacaacgtcgaggctttgatgctgaaatgtgtcaaaggctgcataaaacccaggggctctagtcatatactcaatccttggcctgatacagttttccttttgtttgctattttgatttctcctttcccttttccctttctcttttacccttgccatattccatgacagtcacttccaacatacaatctttaagcttgctctctatgttatttctctgtatgagttagcagtgacttattccaatcttcctcgaaccacccttcaactcccgctttcttttgcggtttccctcactaccactaccatcatgagcctcagaagaatcaaggtgcaggcatctagatactttactcgtcgtggatcttgtatattatttgttatcctgatatggttcctcttttatcatcttccagctccgccttccacccagaacaatacccgggcagaccgaccacccccagagcatcgagtagaggacacggcccgatttatctaccgctctccctttcgaaacgatccgaatgttcaatacgaacaacagctatcaaatgcgctggaagagattgaaaaagccgtattgacacaaagtgaggaaagcaacatatccaaagatagaatctggcagatagcgaaaagtcaaaaggataggggggaagactcaatagtatttaaagggaaaaataaggactggatatacacagtaagtactttggccggatccttgctcgactttgactgaaaccacaaagttagtcactgataaaaaggccgtcgagtttttgaccaacgagctgtccgccatccccgaaatcgcaaccatatacaaatcctaccctcaaaatatcctccgagcagacctcctcagatacctccttctctggtactacggaggcttctacgcagacatcgatgtcttccccgctcggagcatcaaagcatgcccagcactagagcctttcttcgcactcacaccagacggatacacaaaaagtacccatcccgatatatcgctcgtagttggaatcgaggtcgacgagccatacgcttcaccgaaattcatgcgcgactggcactggacaaggagctacggactgatccagtatacgatgtatgccccacgacgcttcagcccgcttctccgcgaaaccatcgtgcgggtcctggcacatactaggcaatacaatggagaacataccagcttcttccccagtctggcgtatgacgagaagactatattaggagtcacggggcctgatgtcttcacggatgcgattcttgacacactttcctcctcgcttccttcgactcatccgttcattcaaaaatctgtcgacgcagatgcagatataggggatctaatctctgctgagactggggagctggagaaacgggtaacgtgggctccgtttcatagactccgtgaccctgtatgcattcaggctggtgaggctgtcccaaatgaatccatgggtggattgtgtgtgttgccaatcagtgtttgggggaatgggcagagacatagtgaggcgggagggtttaatcatcctgacgcatgtgtcaatcatcggtttgggcggacgtggaagaaagggtggtgggagtatatatttgggtgaagctttcattatttaatctaggctcgatagtggaatacgaatctttggcatagattgattgaaatcactcctctctagaaatggaagtttataaatttatttaatgtactagtggatgatagtagatgagactatacagcatgaatcaattgagtatgagtgtattgaaaagcgaagattattgacaggagaggaaagaactatatgagtcctttactgccagtagagaaaccaagcagcactaagctgagcgaaggcgaaaccccgatttgccgagttcgtgcttgatccactcaaatgatcatttatagcactggcagccttccttcttggggttctggcaacgagcctggttgacagaacaaccaccacagaacgcacatgtatcgggagcatagcagttaccctcgcctacaacacagcttccatggtggcccacacatttggtgcacgcattggttgctcggccctcaagatctctcgcctaaaatgaacatgttaaaaaatgaccttgtttcacaatgggggttagtcggtaatgtacctggactaagctttgctgtatggagttagttaccacatatagtaggttcaaaggataaagactcactggctctccgtagatgatatcctcgccagattggtaaacttcgagctcgacgccatttgcggcaaaaatgccactctgtgtggccgatgcattggcaataagaagggccaggattgccaagccttggacaaatagtttcattttggaaaggaattgacagttctgagcgctagaagggtgtattggccttcaggtattaattggagttagatttgaccgaccaaggttgatgaccacccgcagacttttatatcttgaatttagtgattcaaaatatgtggtcttctactataatgctggcaaggtcaatatgcaatccttcagttcagattactagcaataatcctcgagttttacgtatatgtcagccttggcgatactgagggtagagttggcattggtagataccagtagacacagatcttcagattctaaagtgaacggacggctatcttgggatcatcaagtagtaagcccacctgagtgctcggtaggctttttgcttttttgaaatgtatattttgtatttccttggccatgctctacatggcaccctacctattttctgctctcttcgactaaatgattttgattgatcccgggtgtcccgaggtctgaatcgtaattgagattgggctgggccttgcgctgcaagttcccattagacccctttgaatgactgatacctgacttgtagagatatttggaactttcaagaccatacggagtatacaactcaaggattaaatacccataacacgaaattatctatagcataaagaattcgaaagaaaagcatgtttttcttcccgtgaatcggggatcggggaagctgcctgcagccgtgtggtggaatcacattgtcgaaaagaaaagtcatagccgtcttatacgagtgatctgcaaaaaaagcaacggactctatgagtcagatctttgaatgcatcaataccagccatggagataacacaaacaacggacacctgcatatgtgatgcccagatgtagtgagagaattatacatggcagctgcactgccgatccatatgaaattgatagggaatcccaaaaaagtacacttacccgattgagagagctcaaataatgtaacagcttgcaaagagctttattccactgctatgacctcgatctttattctttattaccgatcatgggaataaaacagtagtttgcggcggcgcaaatggaaggatctatttatagagatcttccaagttctacatgttttctgtaaaatagatctaagaaaaagatcgacaaaagctatggagattcgtgtgagatcagcttacgtccagggctgctggggtccgtatgcattcaatggtagctctgcacggccgcgcaaggctggatgttatcataatctgagggattgtcggcttattccggcgtggactgcatggccattttgggacaaaagcaaagtcgaataggtcgcatggtcagtctaaattatctacagagtactctgtagcttgcggctaataataagaagaagaagaagaaaccctcgggaatgagattgggaacaatgtgagggggttgaccgcctgtgacggtctcattgcactcactacgcatgcgctacgagattgatatctcctagcttgaagtgaatccataatattcagtctatcttgagtgggaggaactggatagctcgtgttgatcgaagatgcaagtatgtgatcacagctaattcttgaatattctcgcatcccagtcacaatcatctcactcaggccgcgggaagcacccaggttgtcacagactggctcggaacattgccactccactcctggccactgttagtggacaaaagaatataaatatcgttactgaacgtgttctcaataacaacagtacgagttccatccgggttcagcgaagcaacggattgcacaccacctccattggaatatgtgtagctcccggtaccacttagcacaatggcacccggcggcatgaacttgctgaactgagccatcatgtagtatgccgggttgaaagtatatccgccgttggcaatggttaccagaccttgacaggttgcacagccgccactcgacagatgaggaccatcttgatcatttgtgccaagtgtccaggcagtgacgcccgatgcccaattctgcaaaggccccatggtgaaatcggcggcttggttccatgctgcggacgcgggagtccagcattctgtcatatattgattgacgttgggttttgtctcgtggaattgggtaaggactgtccagtctacgttgctggcataacagtgccatgcaactccgtggacatactggctagccccattgatgacagtctgaggataggatggaacatctagtgtctatgcgttagtaaatagaatcctccctcaaagatcccgtattgtcaagtacataccagtgttgtgatcatatgcccagatatcggtgctcaggccggcttgagcgagagccggtccgacataattttgaatcaactgtgcagactcatagtcaaacacatacattgtaggatatccagcttggctgttcagaggctcgttttgaatggtaatcgcatcgatgtgggcgccgagattcgcgtaagcctggatgtacttgacaaagtactgcgcaaaggcactagcatacccagtactcccagtgcctccactggtcaagtagccatcattgaggttattgttattcgtggcgccatcgatcacaccgttcagcttcatccacccgggggcactccaaggcgaaccaagagttttcaaattcgactgaagagacttcatcttagccagcatcgtagccatggcgcttccacggtcgcccaggttaaaaccggacatagatgggtctgcattattcccattatcatcataggtatacgcagggtcaccagacaggtcggaagcgccaatggtatggcgcatcaaggcgaatccagcaccggcaccggtcatcagctcattaagcagttgttcaagtgtggaactggacaaggtgttgaaggaggtaactgtggcatcggtgacggctgctccgaagcccacgattgtttgtttgtgtccgctggatgtatcgtcgacggtcagctgccaggtcgattcggagcctggactgccgctgccttgaacgggtgcggagattgacgagagcttgtaattgccatttgagtttgaacagtaggctgatgcagtggtggctcgctttccgggtgacgcctctgctagcaccgaaagcaggagcagaggaagaaaagatggaagcatgttgtatactggtccccaagagaattttagggaaagccagtctcagtctttcgagggatagaggtgggaattgatgatcatcaggtataggcatgcattgtctttatatatacctatcaaagacaatattgtccaggctgtacccgtccatttccctaaaagagcaatgcgactaatcggccgaggggaaagtacgctgaaacgcctaagaccctgaatttcgctcaatttcggcataagctgatgaagaatactacagtatcaccgactaatgcacgccacatttcaccgacgggtccccgatagcttgtattgtcttggctatctcggggaaattgctaattcgagggtagttgcttccaggttagttgcttggaatacctttccccgcattctcgacggctttttcaatgccattgtgccacggagtattgaataatgggttgcctcaacggtcatgttgcttattcggggtggggttgcccggaagcggcatgaaacaataggatggggcgttgtataagcggtgattaccggaatgagaggggcgaggtgacagccacaaggcaacttgggaagttgtaatcaaagcagaagtaagaagtagtgtaagaagtagtgtataagtcgtaggaaacacttcctttgctgtccaatacttaacaaagagcaaaggggtcaaaacgagaacatttagtacagacgtctcaattaaccaagataaatatagctctccaattttgatgctattcacaatcgtactagtcgaaataatgaggtcgatcagggaagacttggcttaggggagatcaccatccctaaaaggcagccacgtgcagggccacggctaggacgggagaaccattccatgagaacgtgcaatgaattcgaagcatctagagccacgagtggaacttgtaagtggaacttcggtgatgttgaggaatgcaggttgtgtggtgctgaaaacaggtcacgtctgcagatactccgtgttgatgacgtcaacattctgcgaacaggccactcaagtcctaatcgtatatgtaacccctcctccgaatgattttactccttcaaacttctactactagaaataacctgcataatcaatctacatcatgagcggcaataaattccccgtcgatctcaagctgttcaagcaactgaagcttgacccgaagaccgcacagctatcagcccagcaaaagagcgacttgctacacaacatcaacattttcagagatgccatcattgcctttacagcgacgggcgctgcccgtggagtttcgggccacactggaggtcccttcgatacagcaccagaagtctgcattttgcttgctttcataaacgcgaaccccagcaaatgggtcgacgctctgtatgacgaggctggccaccgtgtcgccacacaatacttgctggccgccctggacggcaagattgagcctgatcacctgctggaatatcgtgctgctggctcccaccttcccggccaccccgagctcggtctcacccccggcatcaagtttagctccggtcgtctgggccacatgtggggtatggtcaacggcattgctatggccaaccaggataaaaacgtgattctgttgggctctgatggatcccagcaagaaggaaacgatgatgaggcagcacgcattgccgtggctaaaaatctgaacgtgaagctcttcatcgataacaacgatgtcacaattgctggacacccttcggattacctcaagggctttgatgttgctgggaaccttaagggacatggcttgaaggtccttagcgcccagggcgagaatatcgacgccctatatggcgctatgtgcgaagtcatcaaccatgacggacccgccgctgttgttgtcaaccgcaagatggctcctggaattgaggaaattgagggacaatgcaaggcgcacgatgttattcccgtcgacattgctcgcaaatacctcactgggcgcggctatagccaggagcagcttgctttctatgataatatcaagcctggctcaaacccccacacgtacaagggttcgaccaaagacaagggctcgaaccgcaacattttcggcgaagccgtgaatgatattcttgacaaattgagcaaggaggaggctaagcgtcgtgtcatggttattgactccgacttggcaggctccaccggcctgaaggctatcagcgccaagcaccccgaatcctttatcgcatctggtgtcatggagcgcggcaatttctctgctgccgctggctttgggttccgcagcaatggagagagacaaggtgtcttctctaccttctctgccttcctggagatgtgcatctccgagatcaccatggctcgcctgaacgactgcaccgtcctgtcgcacttctctcacagcggtgtcgacgagatggccgacaacacctgccacttcggtctgaaccacttcttcgccgataatggtctgatggatgccgagactaccaccctgtacttccctgccgatggcgagcagatgaaggccgtagtcaatgaggtcttctggaacaagggcctgcgcttcatcttctccactcgttccaaggtcccttacatcttgaaggagggcaccgaccagaagctctttggagagggctacaagttcgttcctggcaaggaagaagtcattcgcaagggctccgctggttacatcgtctcatacggtgatatgctctaccgctcgcttgatgccgtcgagaacctgcgtgcggagggccttgacgttggtctgattaacaagccaactctcaacattgtcgatgaggagaccatcaagttgtatggctcctcgccattcgtcctggttgttgagtcgattgcgcagaagactggtctcggctctcgcctgggtacccaactccttgagcgcaatttgacccccaagtttaagtctctgggtgctaacaaggagggctgcggtggtctgtaccagcaagtcaatgctcagggccttggaccagagcatatcatcgctgcggtcaagcaggtggctggaaaataaatgtgtgaatgtctaacgtaacgactttttcatgaaataataaaaaacccttttccatttgtcttttgttcatatcttacccatttcttctccttatcacagccaagacttcagcgccaagacctcaggacccctaaatcccgcccgtcgttccaatcagatatcgcggcagttgaagcgacatttggcttcggcactttccactgcattctccataattatcctcccgccgtactgctgattggctgaactctgcatagttttgacttggcagccaggactactcccaaaaagcactagatcgcaggacttgaaaagcacgcaatcgtgctaaaagacgaagtagggctaatgcgatattaggtcttctagatcgatattgatttcttcagggtagagaaaatccatatatagcgcatttccccttttttgtttagcgcctaagttagaattttatcttcgtggcttgaatcaacgtgcttgctatcctttaagcccaaaccatataatggccgaacgaggttctatctcggcatcgtccggtacgccatttgaaaagcgagtatggtatcgcggaacactcttcaatgcctgtattatcggggccgtcggattcacagccccgggcttgtggaatgccatgaatgctttgggtgctggtggcgcgcaggagcctttcttgattaatgccgccaatgcgcttgttttcggtcttagtatgtgatatgttgctgtaatcgcattggatttgaatcgggcttctcgctaacttgatttgcttgctagtgggcattttgtgtctgttcggtggcccaattgccaaccggattggcctgagatggactctgatgcttggtgctgtgggatatccgctgtattcgtatgtatcatgagaacaaggtgtgaaattgtgttatttgaagactgactttatatacagtgccgccttatacacaaataaccgttttgtgagttcttcgtcaacttgtacaacccaggaaagaagactaattcccatgtagggaaatgtatggtttgtgctggttggatcagtattttgtggtttatcgtgagtatcctatactgatcaaagaaataatatcgttgactaacatttatagcgctggtcttttctgggcttctgagggtgctgtggcactaggttatcccgagcctgcaaagcgaggccgatgcatgaagtgagatatttcaaaaagtcctacagtgacaaaaagactgacttaaaaagcatctggctttggttccgtacaggtggccctatactgggaggtgctattgtccttggtctcaaccagtatgttaattccaatttgaattcacatcacggacataatttactgacgattggaaagtgctgccgatgcccatgcaaaaggaaaagttggatctggtaggtctattcaagctagattgaacaaaccgattgctaacacacgacagagacgtatctcatcttcgtcgccctccaatgtactgccgttcctatagccttcttcctcacgtcacctgacaaggtccaacgcaccgacggaagcaaagtcaggattatcctgcaggactcgtggcgtgatgaaatgaaagagctctggaaggtctgccagcggagagaggtatgtttaagatcattggttccatcgtgcctatgtgctatatgtgactgacattcctagattcttttgctattgcctgttttctgggccgcatacttcaatatgtataccggaagtatgtatcgtgtgtttgctcttatatgcaattgctgataacttggtccagatttcaaaacgtactactttggcgtgcgcgctcgcgcgctgattggattcgtcagtatgtttacacactcacaatatttggacacacttttgcatcagtgctaacatggaaaaaagcctacttcgccactcttcttgcatcaacgatcattagtagattcctggactaccgtggcctttctatcagaaacagaatcaagtacaggtacaaaatcacaccatccaaaattgaacttaggagcaaaattaacaagccacagctttttctacgtaattgtcgtccacatcgctgcctgggtctactgctgggttatccaagagaagtacactaggaacccaccaacacttgattgggccgacaaaggtttcgttgaaggattcttcgttatcctgctctggggtgagtcttatagattgatcaacatcccacatagcgctaacctatttcatcagaattcgctcagcaatcgctgcagaacttcctctactaccttctatccaccatgaccgacaatatctccgaactctgtaagtcgaaaattcaaaccgatcgtcctatctccagattactaataccatatagcccgcttgtccggtatcctccgtggccaagagagcttttcacaggctgtttcttacggcctcaactcgaagaaatggcatggtggaagagtgccacttatcgttaacactatccttctcggtaagtgatacacattgactggttataaagaagtagtgctaacttttatttacagttcttgcggtgtggcctacttggctcgttatcagggtccacgttcccatcgagcattccaaggagacttctgagttgccccaagcccaagacgaggagcagaacaacgttagtctctctgacaaggagacatttcatgttgccgaagcagttgcttcgaaataaaaagttggagttgttgaatgtccttgaaaaaagtacttaatctatttacgacacggggttgacgtctacacaaaagttccctcacacaaaatctattccatgaatcaatgagaagcctatacataatctgtgaataatcatctgttctttactcctctttcaaactgcgagaacaccctcaccattctggctttcctcgcgtaatttccgctctgcacggctctcactagtgggatcaagataggcttccgtataaggttagcacaagatgcagaattgaaaaccacaatctcttgacatgagtactcacgtatttcaccaaaaacggtggtccggataccttgtctagctcctttgtatgtaccagggataacccgatgaagggtacacctaagagatcgtcagttcccaagtccaaagccacaaagtgaacagtgcatagttaccgattatcccacattgcaacactgccaacagcccatttccaacgaacagagtgatcatcggccgagtggatatgatatgccaagaaatcaagaaccttgtctagaaaggcatcagccctaaaccacaaactgattcgttcagtatttcactcaccggattccactttcttaagctcagcaaatccagtcacaaatccaggattgacgttcaatgccttcagcttagtgactgggtgcgtgcgcacggctgggtggtgtgtatcgattggagggcgattgggacctgcaccccatagatcgatgatggtatcatctatttagttaatatgtaagcaggtttactactatggttatgaaggagacaaacactgcagccttgaggtatgcacggcgtgaaggccatctaggaaccttttgtacgcgttgcttagggcatcgtataagccatattgagatacctatgaaatcaacattttgtctcgaatgcggcctgtatctgtaacatacccaagctgtgtcgccaccaacttcgggatgttcttccattctcagtagggagtaggtaggtgctatgatgtgttaaagattaacagccagaaaatatggttcaccacatacgattgatctcgaatgatgtatcagcgtggaaatctccactcggctacagaagtagaaattgctgttagaattttggtttaagcattttcaagatatcttacccaaggcgtgtagcttaggatttcacggtgatcctcgcggctacctttgatattcacgaactttgtgctgggttagcaatgatgacaaaatgccatgaagtggttatggaacttcatactttttgatcctgataattgtcagctcacttgaatctgccttggaatccagaaaacttcatgttttagcttaccttttgagcagggtgtttatccaagatacctgcaagataaaattattaatccgatgccgccattcggaaatccatatggccttaccataatgctgaaacagttctacctggcgctcagtagtaagatcctgatcccgaaagaagacaactccccgctcattaacgagaagcgccaattcatccagctgagtctcattcagctgagacaattgcacatcctcgaggacagttccaatagactcagtcaagtcaaccggcttcgccacagagaatagtgccttcttctccggatctgcaaagaatgctcggtctttgggcggggtaaatggctcacggggtggttctggaggcacatgattcttgatcttctcgttgaaatgaggatggagtgtaatggggaatcccgaatcggcggaaatatgcttgcgggcttcgagattggccatattctgtgagctcagttgcaatgatgcgtgtaaacaagtaaaaggattataatctgggtgaagtggaagtagatttacttatttcgtgctttataatctgttgagctcatattcggcttggattgcgtcaaaacgctactagtcgatatgttcgagtccaatcggctatgtatttccctaatatggtgtattgttagattctatgtcgaatatgtggagagtacgcacgcaatgtagtctttataaattccgtagtggaatttccaacgttgctataataatacaggtgcatattgggatcacgtggtaccgatggagtatatgcatcaagcgaagatactctccgaacagtaattcagacggtccaatataaaagtgaccaaactgttaatgaggcatatgaagtcctaattttgatccaaaaagggataagaattgtcaatgtgtggggtggtgcaagcaagtaaacaagcaagattccaataactataagtctagttatgttttggggattgttttgggacccccccccttggttgttgggacccccctttggctgatctctgcgtgtctgatcccttaggcatcagctatttctgccatttcttttaattttctgccatacttatttctgtaagtttgaattcttgtttacatagtaaaaaatgcaccattctgctcaaaattatgattatttctttgatttggtatgctttacaggaaacaactgtttcaatctgaaccgggtgctgtaaatatcacgtggaatgatagcagtgtcggggtcagcctcatgcaattcggccatgatctgacgagtagtacgacccaatcgaagcgcagtaacaatctgctctcttttattggtaagctctcgggttcgctgtacagcgtgcgttgaagcaggagatggttggtggttatgggacgggttctcgattgtgacatgccaaagacctgttccgtggtctcgccgcagagccatagagaaggggcattctaacgccatagtattggtattgattcgcttcttcggttgaggccgatgctcacatgcatctggcctccgaccacgatcacagataagccggactgtcttctttaccccccttttggtagtcttagaccggcggatcgtaaccgcatacccatgtgggcgtgcgaagtcgttgatagcatcttttgcttcatcggaggtcgcgtatgtacgatcggtgggcggtagcgccatcgtgatcgcgcatgtcggctgtgtagagggtggaagcggctgtatgagggaatcaggctctggctgggcgctgggcgggttggattgggtgtctggattgatatcgggatcggtattggactcggaatccgagtcctcaaggtaagcaagccccaaagaggccatatcgaaaagataaatgctcaaaacgtgaagacaacgcgaaagggatcaaagatggtggagacagggccattgaacttgaaatctaggcttggctttccagccatcagctttgcgccggtaaagtacggacggagcttacttttctgctaagaagatcccggcccgaaaggggtcccctccgacttactgtaacgcgtcacgtcacgcgtgagatcaagtgccagatcatgtgccaaggcggccaggaaagcggtgagtcttgatggtaggcggtcagttgatgcctgaactaggggggtcccgacaaccaatggaggggtccccgatacaatttccttttaggtattaggacttgtagtaaaggcctactgggtcgcgtggctacaaaagcctctcatgcttttcatatcaagaaaatcgaggtctaatatgaggagctcagaatccaaatttgccagtgctcaaatatcacatattcgatggcgcaaactggagatggctatctgtctggctattcgaggaccaccacatgtccatatatagtacaacatttcactccacttccccattctcaatctccaacatcatttcctccgctttccttgctaccgttctcgcttcgtctccaatatcgcccctcatcctcgctacctccccaaatctcttccgccatagcagccacctctccttgcaaaagccatgtttgccttcccagagagggcctccccttcccggcgccatacccggatagccgctaagatcttcatcccattcatagatctctacgccgagtgtactgatccatacagcagcagaaggaatcgcctctaaggggtgagttagttacaactggcctataggtatttctagcgcgtcgcggagggtgaacattgtaaaccataagtatgcgaatacaggttcctcgattatcatcaaaaatgctatgaatttatcccagttgatgattttcaaaattgcactttgtcggtgatcagggggtccaataggtacggatagattccactgctcacggagtgcccagcctagtgtcgggaggtctttccaaatttgcatatcgtagagaatgagtgcgtccccgctggctgttttcgggcttgggagcttagaaaattggactaggatctcgacgagcttatcatggtattcagaggattcgcaggcgcatcccactatcacagcccacagacgaccaagacctgcttcaggcttcattgataaagagatcgaagcgagattcctcacggcttcttgtgcagagatgctgtcgctgaaaaggtcctataggacagcgaattgagaagtaaacatttcatctgtgacgtctgtcattttgagaaatctcaatagtaatttacagatgaatgtcgtgagtggcatacaataatagatcaaatgcaacagtaaggctagacttggtgaaaaatgagatgattaaaccaagcgtgcctcgtccgtcgtttagcgtggtattaaatgacgcacagggattattccaagtagctatcgaactagtttgctgcgccagtttatatatccactatcttgatgttcatcctcatggatacgattatcatgggggctcgactgtctgtcgactagagctatatgagcggggttgaatttgtcgtgagacagtatggttcctatcttctagaggaatataagtcgattatacgtagtccataaagtagagtcccagaactgaggtgggtatgtgggattagcccaccgactctaaaagcggtcaacatgatcgtcctaattattagtgacggaaaaacggtggtaaggcgagtgtattttgtggcagaaaaatcttaataaattctctaactctctaaaactgacaatagtcctaaaacatgacaatctgatggacaacttagtaatcaaaacaaacaaaacaannnnnnnnnnnnnnnnnnnnnnnnnnnnnnnnnnnnnnnnnnnnnnnnnnnnnnnnnnnnnnnnnnnnnnnnnnnnnnnnnnnnnnnnnnnnnnnnnnnnnnnnnnnnnnnnnnnnnnnnnnnnnnnnnnnnnnnnnnnnnnnnnnnnnnnnnnnnnnnnnnnnnnnnnnnnnnnnnnnnnnnnnnnnnnnnnnnnnnnnnnnnnnnnnnnnnnnnnnnnnnnnnnnnnnnnnnnnnnnnnnnnnnnnnnnnnnnnnnnnnnnnnnnnnnnnnnnnnnnnnnnnnnnnnnnnnnnnnnnnnnnnnnnnnnnnnnnnnnnnnnnnnnnnnnnnnnnnnnnnnnnnnnnnnnnnnnnnnnnnnnnnnnnnnnnnnnnnnnnnnnnnnnnnnnnnnnnnnnnnnnnnnnnnnnnnnnnnnnnnnnnnnnnnnnnnnnnnnnnnnnnnnnnnnnnnnnnnnnnnnnnnnnnnnnnnnnnnnnnnnnnnnnnnnnnnnnnnnnnnnnnnnnnnnnnnnnnnnnnnnnnnnnnnnnnnnnnnnnnnnnnnnnnnnnnnnnnnnnnnnnnnnnnnnnnnnnnnnnnnnnnnnnnnnnnnnnnnnnnnnnnnnnnnnnnnnnnnnnnnnnnnnnnnnnnnnnnnnnnnnnnnnnnnnnnnnnnnnnnnnnnnnnnnnnnnnnnnnnnnnnnnnnnnnnnnnnnnnnnnnnnnnnnnnnnnnnnnnnnnnnnnnnnnnnnnnnnnnnnnnnnnnnnnnnnnnnnnnnnnnnnnnnnnnnnnnnnnnnnnnnnnnnnnnnnnnnnnnnnnnnnnnnnnnnnnnnnnnnnnnnnnnnnnnnnnnnnnnnnnnnnnnnnnnnnnnnnnnnnnnnnnnnnnnnnnnnnnnnnnnnnnnnnnnnnnnnnnnnnnnnnnnnnnnnnnnnnnnnnnnnnnnnnnnnnnnnnnnnnnnnnnnnnnnnnnnnnnnnnnnnnnnnnnnnnnnnnnnnnnnnnnnnnnnnnnnnnnnnnnnnnnnnnnnnnnnnnnnnnnnnnnnnnnnnnnnnnnnnnnnnnnnnnnnnnnnnnnnnnnnnnnnnnnnnnnnnnnnnnnnnnnnnnnnnnnnnnnnnnnnnnnnnnnnnnnnnnnnnnnnnnnnnnnnnnnnnnnnnnnnnnnnnnnnnnnnnnnnnnnnnnnnnnnnnnnnnnnnnnnnnnnnnnnnnnnnnnnnnnnnnnnnnnnnnnnnnnnnnnnnnnnnnnnnnnnnnnnnnnnnnnnnnnnnnnnnnnnnnnnnnnnnnnnnnnnnnnnnnnnnnnnnnnnnnnnnnnnnnnnnnnnnnnnnnnnnnnnnnnnnnnnnnnnnnnnnnnnnnnnnnnnnnnnnnnnnnnnnnnnnnnnnnnnnnnnnnnnnnnnnnnnnnnnnnnnnnnnnnnnnnnnnnnnnnnnnnnnnnnnnnnnnnnnnnnnnnnnnnnnnnnnnnnnnnnnnnnnnnnnnnnnnnnnnnnnnnnnnnnnnnnnnnnnnnnnnnnnnnnnnnnnnnnnnnnnnnnnnnnnnnnnnnnnnnnnnnnnnnnnnnnnnnnnnnnnnnnnnnnnnnnnnnnnnnnnnnnnnnnnnnnnnnnnnnnnnnnnnnnnnnnnnnnnnnnnnnnnnnnnnnnnnnnnnnnnnnnnnnnnnnnnnnnnnnnnnnnnnnnnnnnnnnnnnnnnnnnnnnnnnnnnnnnnnnnnnnnnnnnnnnnnnnnnnnnnnnnnnnnnnnnnnnnnnnnnnnnnnnnnnnnnnnnnnnnnnnnnnnnnnnnnnnnnnnnnnnnnnnnnnnnnnnnnnnnnnnnnnnnnnnnnnnnnnnnnnnnnnnnnnnnnnnnnnnnnnnnnnnnnnnnnnnnnnnnnnnnnnnnnnnnnnnnnnnnnnnnnnnnnnnnnnnnnnnnnnnnnnnnnnnnnnnnnnnnnnnnnnnnnnnnnnnnnnnnnnnnnnnnnnnnnnnnnnnnnnnnnnnnnnnnnnnnnnnnnnnnnnnnnnnnnnnnnnnnnnnnnnnnnnnnnnnnnnnnnnnnnnnnnnnnnnnnnnnnnnnnnnnnnnnnnnnnnnnnnnnnnnnnnnnnnnnnnnnnnnnnnnnnnnnnnnnnnnnnnnnnnnnnnnnnnnnnnnnnnnnnnnnnnnnnnnnnnnnnnnnnnnnnnnnnnnnnnnnnnnnnnnnnnnnnnnnnnnnnnnnnnnnnnnnnnnnnnnnnnnnnnnnnnnnnnnnnnnnnnnnnnnnnnnnnnnnnnnnnnnnnnnnnnnnnnnnnnnnnnnnnnnnnnnnnnnnnnnnnnnnnnnnnnnnnnnnnnnnnnnnnnnnnnnnnnnnnnnnnnnnnnnnnnnnnnnnnnnnnnnnnnnnnnnnnnnnnnnnnnnnnnnnnnnnnnnnnnnnnnnnnnnnnnnnnnnnnnnnnnnnnnnnnnnnnnnnnnnnnnnnnnnnnnnnnnnnnnnnnnnnnnnnnnnnnnnnnnnnnnnnnnnnnnnnnnnnnnnnnnnnnnnnnnnnnnnnnnnnnnnnnnnnnnnnnnnnnnnnnnnnnnnnnnnnnnnnnnnnnnnnnnnnnnnnnnnnnnnnnnnnnnnnnnnnnnnnnnnnnnnnnnnnnnnnnnnnnnnnnnnnnnnnnnnnnnnnnnnnnnnnnnnnnnnnnnnnnnnnnnnnnnnnnnnnnnnnnnnnnnnnnnnnnnnnnnnnnnnnnnnnnnnnnnnnnnnnnnnnnnnnnnnnnnnnnnnnnnnnnnnnnnnnnnnnnnnnnnnnnnnnnnnnnnnnnnnnnnnnnnnnnnnnnnnnnnnnnnnnnnnnnnnnnnnnnnnnnnnnnnnnnnnnnnnnnnnnnnnnnnnnnnnnnnnnnnnnnnnnnnnnnnnnnnnnnnnnnnnnnnnnnnnnnnnnnnnnnnnnnnnnnnnnnnnnnnnnnnnnnnnnnnnnnnnnnnnnnnnnnnnnnnnnnnnnnnnnnnnnnnnnnnnnnnnnnnnnnnnnnnnnnnnnnnnnnnnnnnnnnnnnnnnnnnnnnnnnnnnnnnnnnnnnnnnnnnnnnnnnnnnnnnnnnnnnnnnnnnnnnnnnnnnnnnnnnnnnnnnnnnnnnnnnnnnnnnnnnnnnnnnnnnnnnnnnnnnnnnnnnnnnnnnnnnnnnnnnnnnnnnnnnnnnnnnnnnnnnnnnnnnnnnnnnnnnnnnnnnnnnnnnnnnnnnnnnnnnnnnnnnnnnnnnnnnnnnnnnnnnnnnnnnnnnnnnnnnnnnnnnnnnnnnnnnnnnnnnnnnnnnnnnnnnnnnnnnnnnnnnnnnnnnnnnnnnnnnnnnnnnnnnnnnnnnnnnnnnnnnnnnnnnnnnnnnnnnnnnnnnnnnnnnnnnnnnnnnnnnnnnnnnnnnnnnnnnnnnnnnnnnnnnnnnnnnnnnnnnnnnnnnnnnnnnnnnnnnnnnnnnnnnnnnnnnnnnnnnnnnnnnnnnnnnnnnnnnnnnnnnnnnnnnnnnnnnnnnnnnnnnnnnnnnnnnnnnnnnnnnnnnnnnnnnnnnnnnnnnnnnnnnnnnnnnnnnnnnnnnnnnnnnnnnnnnnnnnnnnnnnnnnnnnnnnnnnnnnnnnnnnnnnnnnnnnnnnnnnnnnnnnnnnnnnnnnnnnnnnnnnnnnnnnnnnnnnnnnnnnnnnnnnnnnnnnnnnnnnnnnnnnnnnnnnnnnnnnnnnnnnnnnnnnnnnnnnnnnnnnnnnnnnnnnnnnnnnnnnnnnnnnnnnnnnnnnnnnnnnnnnnnnnnnnnnnnnnnnnnnnnnnnnnnnnnnnnnnnnnnnnnnnnnnnnnnnnnnnnnnnnnnnnnnnnnnnnnnnnnnnnnnnnnnnnnnnnnnnnnnnnnnnnnnnnnnnnnnnnnnnnnnnnnnnnnnnnnnnnnnnnnnnnnnnnnnnnnnnnnnnnnnnnnnnnnnnnnnnnnnnnnnnnnnnnnnnnnnnnnnnnnnnnnnnnnnnnnnnnnnnnnnnnnnnnnnnnnnnnnnnnnnnnnnnnnnnnnnnnnnnnnnnnnnnnnnnnnnnnnnnnnnnnnnnnnnnnnnnnnnnnnnnnnnnnnnnnnnnnnnnnnnnnnnnnnnnnnnnnnnnnnnnnnnnnnnnnnnnnnnnnnnnnnnnnnnnnnnnnnnnnnnnnnnnnnnnnnnnnnnnnnnnnnnnnnnnnnnnnnnnnnnnnnnnnnnnnnnnnnnnnnnnnnnnnnnnnnnnnnnnnnnnnnnnnnnnnnnnnnnnnnnnnnnnnnnnnnnnnnnnnnnnnnnnnnnnnnnnnnnnnnnnnnnnnnnnnnnnnnnnnnnnnnnnnnnnnnnnnnnnnnnnnnnnnnnnnnnnnnnnnnnnnnnnnnnnnnnnnnnnnnnnnnnnnnnnnnnnnnnnnnnnnnnnnnnnnnnnnnnnnnnnnnnnnnnnnnnnnnnnnnnnnnnnnnnnnnnnnnnnnnnnnnnnnnnnnnnnnnnnnnnnnnnnnnnnnnnnnnnnnnnnnnnnnnnnnnnnnnnnnnnnnnnnnnnnnnnnnnnnnnnnnnnnnnnnnnnnnnnnnnnnnnnnnnnnnnnnnnnnnnnnnnnnnnnnnnnnnnnnnnnnnnnnnnnnnnnnnnnnnnnnnnnnnnnnnnnnnnnnnnnnnnnnnnnnnnnnnnnnnnnnnnnnnnnnnnnnnnnnnnnnnnnnnnnnnnnnnnnnnnnnnnnnnnnnnnnnnnnnnnnnnnnnnnnnnnnnnnnnnnnnnnnnnnnnnnnnnnnnnnnnnnnnnnnnnnnnnnnnnnnnnnnnnnnnnnnnnnnnnnnnnnnnnnnnnnnnnnnnnnnnnnnnnnnnnnnnnnnnnnnnnnnnnnnnnnnnnnnnnnnnnnnnnnnnnnnnnnnnnnnnnnnnnnnnnnnnnnnnnnnnnnnnnnnnnnnnnnnnnnnnnnnnnnnnnnnnnnnnnnnnnnnnnnnnnnnnnnnnnnnnnnnnnnnnnnnnnnnnnnnnnnnnnnnnnnnnnnnnnnnnnnnnnnnnnnnnnnnnnnnnnnnnnnnnnnnnnnnnnnnnnnnnnnnnnnnnnnnnnnnnnnnnnnnnnnnnnnnnnnnnnnnnnnnnnnnnnnnnnnnnnnnnnnnnnnnnnnnnnnnnnnnnnnnnnnnnnnnnnnnnnnnnnnnnnnnnnnnnnnnnnnnnnnnnnnnnnnnnnnnnnnnnnnnnnnnnnnnnnnnnnnnnnnnnnnnnnnnnnnnnnnnnnnnnnnnnnnnnnnnnnnnnnnnnnnnnnnnnnnnnnnnnnnnnnnnnnnnnnnnnnnnnnnnnnnnnnnnnnnnnnnnnnnnnnnnnnnnnnnnnnnnnnnnnnnnnnnnnnnnnnnnnnnnnnnnnnnnnnnnnnnnnnnnnnnnnnnnnnnnnnnnnnnnnnnnnnnnnnnnnnnnnnnnnnnnnnnnnnnnnnnnnnnnnnnnnnnnnnnnnnnnnnnnnnnnnnnnnnnnnnnnnnnnnnnnnnnnnnnnnnnnnnnnnnnnnnnnnnnnnnnnnnnnnnnnnnnnnnnnnnnnnnnnnnnnnnnnnnnnnnnnnnnnnnnnnnnnnnnnnnnnnnnnnnnnnnnnnnnnnnnnnnnnnnnnnnnnnnnnnnnnnnnnnnnnnnnnnnnnnnnnnnnnnnnnnnnnnnnnnnnnnnnnnnnnnnnnnnnnnnnnnnnnnnnnnnnnnnnnnnnnnnnnnnnnnnnnnnnnnnnnnnnnnnnnnnnnnnnnnnnnnnnnnnnnnnnnnnnnnnnnnnnnnnnnnnnnnnnnnnnnnnnnnnnnnnnnnnnnnnnnnnnnnnnnnnnnnnnnnnnnnnnnnnnagtcacgtgatccaactgtatcagggatgaaaaatgacagtattcatcctagattctgacaattagtctattgtaggcctgccctctgtggagtttatccaaaaccacgcacaattgtacgttataattatcgtctcttagtaaggctgattaccaaacactatgagtactaggtacacagtcgttagatgtattcctgagaagagatctaaattgatgcatcggacataatcttgcttcaacagttatgagatgcaaactccaaattcgagccgtcatgacttggcatgggtatcatcagaagtatcgtcgttctttcctttgacagagagccactccagccccaatacaccgagaataccaaagcaagagagggcgacgctcacgtagaatgtctgatctagggccttgttgtaagcaagcaggacaacatcgtagagctccttaggcacttggctcttgaatttcgttgcgccggctgcaataatttcagtggcatcaacatccggagcatattgcgccatatttgttttcagctgatttgtgaacacattctgcgcaacggagacgaagaccgcactggtgagattctccgtgaatataacaacagcggtgccgatggggatatcctccaatgatagcgcagtttggggtgcggagaatgctgtctgtaaaccacacccaactcccgctccaagaatcacttgatatccaatccattctgcgtggccggagttgacgtctagcatggtgagcagaccggctccgattgccatgaaagccaccgcaatataggcccattgtacgtagtacccaaacaccgaagtaagaccgcccgtcacgaacgagaagagcacgtagctcagtacaagaggaagactcatgacaccggacttgattggggtggctcccttgatggcttggaaccaaatttgaatctgacgaacaagttagtatgctgtaatttagggtttatccaaccccacaaggagctatacacacgtaatagagtatgacgaaaaacgcagcgacgatgcatgagccgaacaaagatgagccccaaatattgcggttgtagaaaatcctcttggggacggttgcaagttcaccggaccgaagctgaacaaacccaaatgcgaccaaaatcacgaaggccactacaaacagagcaatgattcgcccgctggcccatgggtatttggtaccaccccattgcagggcaaggagcaaacaaatgataccaggaagtaaacagagggtaccgggaatatccatctgcctcagttgattgatgaagccgagtttacctgccttacttcctttgaaagaagaaacgaagaataaaatgaccagaccagcaacaaacccaagaggaaggttaatgtagaaacaccacctccaagtgagtttggcgttattggtgaaggcaccccctatcaaaggaccagcaatggcagaaaatccgtacatagcaccaagggccccaatcaacataggacgttggcgtggcggcaccgagtaggcgatcaataaaaacgaaccgtttgagacaccaccaccaccgattccggcaatagcacgccccacaatcagagcagtggatgtaggtgcaacaccacagatcaaagagcccagttcaaaaataaacagggaggccaagtagacccatttgacggtgtagaatgtgaaaagctttccccacatcagctggaatgaacatactgtgagcatgaaggcactcgcgtaccacccaacatcttctaatgcgttgaaatcatcggtgattttagggatggcgctggaaataattgtgttgtctagccccacaaggaacatgcagaggctcaagctgagagcgatgaggatgagcttggcctttccggggtactgaggttcgttctggttgctgagaggcccagaatcatcggttgacgttggtgtacgtttttcagtctgttgtatttgcagaggatctagaggatctgctgtagatggcggattggtgggtttgtcatgggggagcttcatggttggagaagaggtagaaatatacaaagacctgaaaagtgaacagatttgccggctttctcagatcgtcgcatattgaacaaggatatgaaaaggatattagacttttatattgaagcttccacgggttcctctagatccgtaaggggaatagtggatcacgccgaggcatgagtcatgttcactcattgtgacctcctggtgatcaaggcgctttggggaatgcatttggatagtttgttaatccctaataattgcaaaggcaatgtcagaattgggaaagcctggtagccgtcttaccatcccaccctgacattgatacctggaacaggtatgggggcggtaagacggctagtacctaacccagtgagacaatgttatgcagcaaacccatccaatacggtaggcggtcggcttctgccgaaaagtgaggttatatcggactttaaggatgctatttcgcccttcggggcatatggtcaaatgaaaatatacagagaagattagcatggcccctgcactaaggatgacacgctcaatcaaagagaagctacctatttttttctcttttacacgtcttttattaagcttatagggtggaggccttttttgcaatatatgattggtcctacgcaattgagaagtcacgtgtaaagccccatagccccacgtcgcaggtacgaaaccgaccaacggcgattgctgaatttattcccttccaacttcacagatctcattatcacgatgttaaagcaaacttcactttcagcctgtaggtgatatttccagtcgaacatagctgtaaatagagaaatgcaattctactaaacggtccgatctcgggaggtccacggactacggccggacccactcttccccgcggaatttcccacgactgatcttccaacagaaggccgaataagggtggattgaaggttgatgaagcgcattaaacgaggcaactagctggtaagagccaggcttcaagcaattgctccgtattatcctacgtttaggacaaaactcgacttcgccacacatctcaggctcagccgaggggaacttgccgcgggatttccctccacccgaaaagcattgacaaacaagatggaaagcggggacgagcgaccataccggtctcacacgaagccagcatgcgtaccgtgccggcggaggaaatcgcgatgcaaattggagccccacaccgcggcctgtctgatgtgtcgtgcacacggcacagagtgtacatttcccaacggcagaggaaagtcaacaccgcaaaagaggtattctacagaggatagcccaatacaaccgcacccgactttacgaactccagccgtagctgcccggccactgaaccggttaccgccaccagtagcgacttcgccgcagttctcgattgtcacacaggctcagaacgaacaggatacaccgctgtctcttgaagccgacgatgataatccccatatcctcggtccggcggtgactggggataatcatgtcttggctgactacctgtctaacatttcgggtggccaggggattcgtgagattcgtccagtcgagccgggtagttcctcatccccggttatattcaccaaggtgcagaaaaggccgttggggctcatggtgaactccagtccggcattgcataagttacaaaccatcgaaaagcttgtagagccatggggaccacacttgatagacatgtgagttagatgatgttggttagtattcgcgagaagtttggaaactaattgtccccagatatctgagaaagatcaatccctgcatcccactactcgaagaaagttcctttcgggcgcaatacacaaatgccagacatcgcatttctcctgcgcttttggcgtgcctgtatgcccacgtgcttacccaatggcaacatgacccccttttgtcacgagaaagatgtccagacattcgttttgtctggaatcttgctattgaagcgtcctattcggagttgcatgcctcagctggaatatcaacgataaaggccatcctcctcgatgttgggggtcgtccaaccacatctatgacaggcaacggagtaaggcttggttcggctgttgcgttgtgccattccctgggtttaaatcgaaacccccttccgtgggatatcccacaggaggagaagcacatgagaatgaagatctggtggtctatattactccatgatcgctggtatgttttcaagaacgaacctttcaaacagtgcaatatttcaggaactcatcatcaaacaggtcaagtctggcgtatggaacacctccccatatcaggagatcacaatacgatgtaccactaccaaaatctgagtacctgtcagattgggaacgagaccatgaagcaaacgcggttttcatcgagcttatgaatttgaccgatgtgctagatcactgtctggagcaggtgtatagcatccgaatagagacccaagcaccaagcaggaatctagaactagagttgaacaaatgggtggactcactcacaggagacatccgcaaaatcatcatccgtggctcaaacctaaatatacccggatcctctaatctccgtctggcatacctcgcaacaaggctcctcctccggcgcattgacctagatcgagagcggcaagcaccagactcgaatgcagagcacatggccaaccaaatcatggaagcgcgcaggacggcggaggacattgtggttctggtccaggaactcggagaagcccagctgggtgacttctggttacctgtcgtagcatttacattttcagcaacggtgacgtttttgattcggtgcgcactagagacagagcaggcagcgggtcttgcacagagtggttctctgcgaatggcgaatgaccttttggattcgttacgatcgcaccacaagaactttgggtgggatctaggtgatatttgtctcgcacagcattctgatgtcattgacaagctgttgaagtcagagccaccgcttgagaactcgggggagacaaatcttgatctccgtcagccttttatgcctgatatgactttcgttgatgatatgtttccaagtacttgggatatattgcagattatggagtgaatctaataaaaatatttgaacaacagctgcatattatattgagacccgcccaggaaaggttcagacagggaggcaatacggtctttatcgaccaagacgttcagaagagatcctgcagtagaatatgccgtgttcacgcgaggtagattcgacttcctgccaaccgggtgcgcgtgtattgatatcgagggggagacatcgtttggctgtgtcattgtggttatgggtgttgtgagtttcaagtcgataaggccgtgcctgaatccgctgtggcatagtggcagctcgagttgcgcagttgggcctcaacatcacggtatgtgcatttggcgtttggcacaattatagagtggtgtgctaattgaccccccaaaaagcggatttggaactctggcgtaaacaggagtcggaattcctgcgtcactgcagtctgcagcggtcatgtattgattgatatacgagcgaacttacatcatctgtgaatcactattgagcattctcgcttcgaccatcttatcagtagaccctcctaaatacggtctttataatctttggagtgtgatagtaacatgtgcctgcgagtcctctggataccatgataagattgtcgagctcctagtccaactctccaagcttcccagcgaggatatactcattctctacgatatgcaaatttggaaagacctcccgacactaggctgggcactccgtgatcaccgacaaagtgtaatttcgaaaattatcaaccgggataaattcacagcacttttgatggcaaccgaagaacctgtattcgtatacttatggtttacaatgttcaccctccgcgacgcgctagaaatacctataggccagttattactaactcaccccttagaggcgattccttctgctgcgatatggatcagtactctcggcgtagggatctataaataggatacagatcttagcggctatccgggtatagcgccggggagaggaggccctctctggaaaggcaaacatggctttttcaaggagaggtggcagctatggcggaagagatttggggaggtcgctaggatgggcgagattggagacgaagcaagaaaggcagcaagggaagcagagcaaatgatgttggagattgagaacggggaaatagagtaacaaattgaatgtatagacataaaactgaccatatggacttcgagcttgaagtaaaagacatcattgtaagttcgaactgaaagataattactcatctggtgtccaggtctctgtataatatccttatcaaattgcacctattgcgaggaaccaggtcgatcttgatagaaaaaagagtgcactcaactaaatgactaacatggagaaagaaagaagaagcaagttgtaaagtggaagcagctagttgatatagctgaccatgcaaacgttgcaaacaaccaaccttctcgcttacctatctaacaaacaatctatggcgagcaagcaaatatgaagcatatgataatgacctatcttagatcgggacactagtaggagatttgccaagctaggatttgcatggtaagataaaccaaacccgaatgcatatagtggtactattgaatcttcctaaataaatctagcacgtaatagcgagctaaatggcgaaaagaaaaagcttggcaggtggaggtggcgacgtagatgtgccaagttgggttgactaaaacattcaacaccatgccatttcgcgcaatgatggttgttttgttattatcacgtcatgtacttgaggtcttgggaaaatattggtttcccccatggcagagaacttttagctgcaggtagttacatgctttttcccgatacactctcttcttttttctctttgtgtccaccaaaccacagaaatcctgcacatcagagattcaggcgattcgctcggacggacgactaagcgtcgggttgaaggagctacctcgaaaggattatgatccactaatcagagggttagaacggatcaggaacagattccgatgtgtcgcgatctgcgggatcataggccgatatacatgacccttcggatttcaagattggtccgacggaaccggcccggcctgctccacatggttccgcacgggcccttgcttagagttttgtgtctggcaaagatatacgattgatcttgctctttcacatcctctgtttgcttatcccttgtccaaccattgctactggagaaagtgaccgtaacctagagattatgataggaagtgtgtgactcggagtcttcgcaattgctaactatgagtggtctcgtattactcaaccccatttctagagccaagaaagagcgagataaatctaaattatggcgtgataacatttccaagtaccctcgaaacgatatataactactcattcagctcattcattccttcatgataagtgtctatttattcaaagacccaagtcgacggtgcacgcctctttccattgccaccaagaaacaagctacacgcacatatggatttggcctccaaggctgaggctacggccacggagagtctttcatctaataacgagagagccctcgagagcaaatatgccgatgaaactctgcgcattcttgagcttcatggagactctgttgggccattgacgcccgagaaggagaaaaagctgagacacaaattgtactggaatatcttcggactactctccgctatcaacctactgctatttgtgagctcattatacgatcatcttgttcacagcctctaacttctctagatagataaatccactctgggctacgccgctattctcggcctgttcgaagagactggtatcacgaaggctgaatacaacaatcttgggactttcttctacgtcggtacgtgacattattgtttctctcattgtaccttctctaacattcccataggttacattgttgcgcaatggccgggacattatgctatgcaaaaactaccatttggaaaatttgtcgctgctcttgtcttcatgtggggtgtcatcctactacttcattgcgttgccacaacgtattccgctcttgtggtcctccgactagcactcggtgccgctgagtctgtcgttgtacctgcaatggaagtcacaattggaatgttcttcaatcgttacgaacagtcgttcctccaaccctttctttggttgacgtcggcagccgcccccatatgtgccgcatttatctcctacgggttactttggagtcatagcgccgtcctgccatggaagctgttcatgattattactggggctgtctcggtacttctttcaattgttgtttggtttcattatccaaataatccagccgatgctaaattcctgtcactggaggaaaagattcacaccatcagacgggtacacgagtcaagtcaaagttctattgaacagaagcagttcaagaagagtcagtttatagagacgctccgcgaccctgtctcatggctattcgctctgcaggcctttaccctgatgatgtctaataatctcacctacgggcagcagaacctcattaccaaggctcttggggtggacagcctgggttcgacgctcgtggctgcagctggtggcggtttcggtgtcctggtctgtctcgcaggagcatatgccctgcgatggtggccttcaaatcttgccttccacggactcttctggtgtcttcctgcaattgcaggtggagttggaatggtcgcaattgactgggaccagaagttagggatgcttgcttgtctgctcttggctggccatacctatggtaatacctacattatcgcgttgggttggactacatcatcggcagccggctacacgaagaagctgacccgaaatgttatgttcatggctggttattccattgcaaacatttgctcgccacaaatatgggttcctaaagacgcacctcggtattatggtgcctggatctccatgatagtggtcagttgggtgggcacaccgttgatccttttcattatacggttcattttgaaacgcaggaacactcaacggaaggcttgggctgcatccttgaccagtgaagagagaaaggctcacgagttgggagtcgtcgaggagcttgatgaaaatgggaatacgatacgcaggcaagttgaaattgccatgttggatatgactgatatggagaacccgttcttcatctatcctatctaaacgacacgccattggaaattccgtcaccatatctctagagaaattatcggctagggaaaatatacatactatcgtcgctctgacaatgtcgaagtacacacttcgccggataacatattattccaagcagatcggttgcgagggtctgtaatttatgtaatacccggacctataaattactatgcgttgttagtttactactttcagtttagcacctcaagacctcgttctgtaaggtccgccttctgttgctccggcataaaaagctcgccctgcccttggtataatgctaaagagatcagcaccgaacgcggggaacgctgaaatgtaagagcatgaaagaggttttgtttgctacaatcttcgacatgggttgtctgagatgatagtattcactagacgggtagaatgccctccttctcctagacacgctcctttatccgggagacctatatatagccgtatgaatcagtatacgctcattcgtagaaaagttggcatattggaggtattgcgtgttatttctccatggtcgaaagtacttaggggtacaaggtggggcggatgcaacacagacagataagaaccagggcctccagcaagcttggcctaattacgcagctcgcttgttgaccgttaacgcggggttgtctgaccttcctccccctcttcgcagtcggtcacgaccagctcaacggacactagcttggcgctttccgttacatcaaaatgtcagaaacacttattctacgtacgtcgcacaactcatcttccaacaaatcaacgattctcctcgttcatggcggattctgtggccaggagtaggacgctgtatggccgcttctcgtcgcctaccacgtgctaattcccgacctccctgcccacgggcgatcgcttgagactagacctctggaaatcaacgacgccgctcgccgtcttgcaagtctgatcgaggctaaagcgcagaagcgaatagctcatatagtcgccattagcattggcgcacatgtcgccgctactatggctctgcgtcctgtttcctttcctttcctctctatacttattgtttcgttagacaacgcatttcttctattagaaagaatctggcatataacaactttcatctccctggggtttcatcatctaattgcggtcagatcggatgagagtgtctaggcacgcaggggcgtagtgcgtacctagaccacgaaaataatcaagacgataggaaagggggtgaatcttagacaatatttcaatgaaccaatcataggcgtagatacagccaaattccaggcattaaggcctcaatatggtggaaatgatccttcgcactatgccccttcgtacctagcgtctagtgccgtaatttctcctactagtcagtataacgaaagataaactagcaagtacagcggtcactgtcaacgctgcttgtcgcgattcagtcgctcaagacacaatcgcctttttcagtagcgccccactcactttagataccaatgtcaccgattctgtagcctgtgcgtcaaaatgcgagactctcaacggctgcgaatcctggcttttcaacaccggtggctggtatgacctgttccgcaattccgccgtggccactgcttcgagcccgcactttgtctttggggggtgcgcgaaagacagtcctcgttcgtctgttgttgtttcaagcattgcttctgctacacctgtaagtggctctgtgcaaacatattcttagagaaaagcaagcgggaaagggaaagtccctgtagccgtacataaacacaatagtatcagcactgactaatggtcttttcttcggtatcctagatcgttgcgaatctgcatggaaaaagacatctcgaagctcacaagaagcatgggcattcattccacagccactagtagggcaagtaaaggcacggagcttctggtgacctgcatatcgcaccagcgcttgctttggtcacctcgcgggaaaaaaaaggagagggtttgtttggtggcctcaggcgctctatgtagggtcagatagttccaatacaacttcctcctttgcttctagattttttactctgtagtccccgagaagcattcatatcaatttaacataaaaagagaaaatggtggaattttcgctgttgctgttgctttggcttatcctaagattatcaatttgaacctagcgtagaaactgaagcaatatatatcgagtgatgggacaaccgaaaattactgctggaaatcgaatatacatctccaaacgacaaatgtgagcctctgccttttgatctaacaaagctggagttaaacagatggctgcctataaatgtagaccgatctcaaaatggaataggctatatcgaggtcgcagggccagtcggcaattccttttacagagaggctctgcagaattgtgcagcagagatgagtagagtctagaccgtgccatctcccatcattactcgcatggggctgagtatagtgtgaacatatagaaaaacgtgacctacgtaagtttatgtacaaatcccacttttgtgcagccggaataggaaatacttggcaaaattagactacatatagaagtgataggatcaggatatgtgaccagtttttatttttttttttcatttggtcatatgcgagttgccaaagtccagccacgaggaagcgattagttgctgaggccactatggtggctaaacttcctatgaagttataaaaatgataactagcctctggaagtaactacatatatgcaattaatagcgatgtactgccgtttgatatcaggcagatatagcgaataataaagtggattttagattgctgtttgtatgggttcatcttggacggtgatatatactttccccggatagaataataatgtaagagcgttgtgtgctttcgatccgattcttatggcttcccatttgcaaacaagcttatattcgaatgatgcttaagtgcggttaagaaaatgtgccgcaatttcctcgcaagtcagcttcattgcttaatccacaagtcggggcgacccttacaacccgcccggtcccacaaggttatgaggagaagagacacataagatcgaggaactcctgtcgggcacgaacctcccgaaaaacaagagatttaaaccttttcgggggtcaatgttgcctgtccaatgatacctcgggcggtggcggttgcagaatacgaagtgcgcatttttaagattggctagtgctttgtgagcaatcagacagatgagtggcgttgttgtcgcctaacatatcgtcttagagcgggcatatctccgaaggagatgggtaccttgcataaacagggaaataaaagggaaagaaaagtcaaatgtaacgtgggagttttgggggccgtgggttggaacgtgtaagtaatgtttcgtaccctggccagagttacatcacaacttgagttcgctagggcgtcaaactaacagaactaaaagacgaagtgagacagcaatcttaaatgctgcaaccgaatcaacggtgatccggcttcatcccggatcgacgcatatgattggcgtgcctgatagggaggtggctccatattctggcccccaagggtttagcgcagggtaattaacttttaactccgtcggttctgatcgccttgcttggttttgggaaagttgcgagatgatttgacctcacaccctctgcttctactcttaccctcacttacgctcttactcttcgaaagatgcaaacactcgcttgtcaaacgaatgtaaacggatcttcttacctccactttcccgccttcctgcatctccatgtggtccgactttcgggtagtgccctgcatcccactacgtacaatcgccagtggaccccgaggcgtccgtgccctggtgcctaacttacggatgtgattggattttatatatcaaactaacagtcttggcaccagtcatgaccctcatgctagtgacgctagagtccgttagggtctgttagcctctttcatgcggctcttgcaatttcatttcgccgggataaccccgaataggcatagggtttgcacatacccctctccaacgaaggcctaccatggctgatggctgatctagtttttgtttggaatgcgactctcttacgccactggctatgtggccatgttatgccacgggtttggcttgtgaccagccggtccatgccgcgttcacgtcaagttggcatgcattctgcgtatcctgttagcctttgggtctagtgttcacactatcaagcattgtttccactcgacgagtctgtgttgggtgaccctgcgccggtggggtgcctccggtgaggcactgacctatgaatcgtggaatcatccggatatcacgcacttgctcatttccacgttttggtagctctgttctcttttctgattagtgcgctcaatgtcggaggtcggcatcttccccagggggcggacatggacagtccccagcaggcgctcgttatatttcagtttcttttccccagcggacattctctttcgaccgtcaacactctcatttcgagctctttgggatacttcccaagcagatatttgtctgcgtcccctcgttgtccgcgagataacctgccattcattttcgggttattaagcggtttctgttgcatataatcattgcatataatcattacattcattttagccatgatgttcaagtcttttgccgccgtgtcggccttgtcactctttgcatcgtctgctgttgctctcgatgccagtctgaagaataatgttgctgtctactatggacaaggtttcaaccaaccccggctctcacatttctgtgaacagaccacgtcggacattatcaacattggctttatcgatcagttccccaaatttgtgggtgacttccctggttccaattttgccaatcagtgtgatggcaactttttccccggtacagagctgcttaatggctgccaccagatctggcaagatatccctatttgcaaagctgctggcaagacaatcctgttgtccatcggtggtggtaccgctacagcccagtctcttccggatgaggccactgcgacctggtttgcggatttcctgtggtattcattcggtccttacaatccatccatctcttcattgggttggaccgaggacttggttggcatcttccctcgcccattcctcacttcctcggttgatggattcgactttgatatcgagtacaacggcggagttggtatgtttccctgaccctctaccttctgactatactttccctaacactcatataggatacgccacactaattaatcgtctacgctcgcatttcgaaaccagcggagagacctactacatctccggagctccccagtgccccattcccgaccctcagctcggcgatgctattaccaactcgtactttgatttcatctgggttcagtggtacaacacccagggttgctctgctgcggattgggtgcacaagaccggcaagttcaacttcgacgactgggtcggtgtcattgagaagagtgtcaatcccaatgctaagctcttcatcggactgcccgcatcggaggatgccgctaatgctggattctacttgacccctgatgaggtgcagccccttgtcgagacttacatggacaagcaccctgatcacttcggtggtatcatgctgtgggaggccaccgctggtgagaataatctcatcaacggaacaacattcactgagcacattaaggatatcctgtacggttgcgctcctcctcctcctcccccgacttcgactgtcacccccatcccttcctcgactgtgactcctgtttcgtcgtccactgtcccgccgtctagctcggctacgccttcggtcacctcggttgcttccagctcagtcgcttcttccagctcggttgtgtcttctagctcagttgtgtcttccacctccgccgcctcttctagctcagttgcgtcttccacgtcggttgcctcatctagctccgctaccccttcggccacctcagttgcttccagctcagtcgcttcttccagctcagtcgcttcttccagctcggttgcctcatctagctcagttgcatcttccacatcggttgtgtcttccacatcggttgcctcatctagctcagttgcttccagctcagttgcttcttccagttcagttgcttccagctcagttgcatcttccagttcggttgcatcttccacatcggttgcctcatctagctcagttgcatcttccacatcggttgtgtcttccacatcggttgcctcatctagctcagttgcttccagctcagttgcttcttccagttcagttgcttccagctcagttgcatcttccagttcggttgcatcttccacatcggttgcctcatctagctcagttgcatcttccacatcggttgtgtcttccacatcggttgcctcatctagctcagttgcttccagctcagttgcttcttccagttcagttgcttccagctcagttgcatcttccagttcggttgcatcttccacatcggttgcctcatctagctcagttgcatcttccacatcggttgtgtcttccacatcggttgcctcatctagctccgctaccccttcggccacctcagttgcttccagctcagtcgcttcttccagctcagttgcatcttccagttcggttgcatcttccacatcggttgcgtcttccagctcagttgcttccagctcagtcgcttcttccagctcagttgcttcttccagttcggtcgcttcttccagctcggtgtcttccaccacccctgctacctctgagcagtcttcctccacttcgagcctccctagcagctctgtgacgactactcctgcttcatccggacatcccgccccccactcctccgccaccggaaagccccacagctcgcatgctggccatggccatggacatggacatggccaccacacccacacccacccccatccccacactgtcccaagctccactcccctgatcccgggacacccttcaagcaccgctcccatctcttctgcgaccgagtctagcgcctcttccactagcgaaggtgtcatcccgaccggtgtatcatctaccagcgacgagaccactgggagctccaagcctaccagcattgagactaccggtgcttccaagcctaccggtgacaacactaccggtggttctagctctactggcgtcgagaccactgggagctccaagcctaccagcattgagactaccggtgcttccaagcctaccggtgacaacactaccggtggttctagctctactggcgtcgagactactgggggctccaagcctaccggtgacaacactactggtggttctagctctactagcgtcgagactaccggaggctccaagcctactggcaacaacttcactggaggatccaagcctaccggtactgactcaaccacagccccggctggtatcaccgccactgcctctgtgactgcctcgccttcctccttggctcccggtacgaccacaactatcatcgtgacctcgtacgttgatatttgcccaactggattcactaccatcaccaccactattaccaaaacctactgtcctggtgatgtctccgctaccgctaccccaactggcaccgcggagatcactgctcctacttctgggcctgccacttccactccttacattcccgaaggctggaccactactgtgactgtttgcacccagtgtgccgctaccccgactaccgttaccctcactaagcccgctgctactactaccactgaggttgtgtcgcagcccaccgccccttcggtgcctgaggaatacactaccaccgtgactttctgcaagcactgtggtcctactggtagcaccgtcaccattaccatcccggctcctactgttactgctactgccaccgcaactgccaccgcaactgctactagcattgttcctggctctggctctggctcttctggaaacggtgagggctccggctccggctctagctctggctctactggtgaggttacagtgcccggtgtcgcccctgtgtcgccatcttcttcctccaagcccatccccagtcatggagcaggaggcttccacgtcggcaagccgtcctcgagcatagccttccgcccctcgcccgcgcgcactgccgtgcctgccgtgcctaccgtcgcgaccaccgccacgaacacacccgcattgcccaccaaccaagagggcgtgtctccggtgtacaccggtgcagcctcgcgttccaacatgaccggcttgttcggtggcgtcctcgccatcgctctttccatgttcatgatgctgtaaagctgcccacttgcccggacagcatgatctcatcatgcgatatgattgatctcacgaatgctgatttcaagacaaactggtactttctagcgactggttgcttttggttcattacgatgtttataatattcttgttcatccgatctccagtctctggagtgattcgatacctcctggcctctttttgtgatttactctggccagtagcggtgagaccatcgtgttcttcgcattgaagtttgcgagcggtcgagtccgtttcaattccctaatgatatccttttcaagtgtggccatctagcctgacttctctcatttttatttcctgtttccatatttacaacggacaacgatgctctttgtataaaaatactacccatttgcatataatgcagtgaagagaatattatcaattattttctggcagttaaaatcctgtaatgacagctttccatctcaataatattcatcatgtcgatgatcgtccaatagctgtgacaattcccccgcattccgacatccacggacctcggctgcggagaagtaataaatggcaacctcacttttgaacttcgattgttccttcaaaatacataaaatgctaccattgaaaggaatcaaagtcatcgagctagcaggcctagctccaggtacgcaatcaatccaagaaacatcaccatcacaactaacatcccaccccaggcccattcgcaggcctcctgctagctgactacggcgcctcagtcctccgtatagaccgacccaactcgacaagcgttgaccaattaacccgcgaccaactaacccgcaacaaaacctccataacgctcgacttacgcaaccaaaactccctaaacatcctcctccgcctcctcccaaccgccgatatcctaatcgaccccttccggccaggcgtcctcgaacgcctcggcctctccccaacagaagtcctccaaaaacacaatccccgcctaatcgtcgcgcgaatgaccggcttccgccgcgacggaaaatacaaagacatggccggccacgacataaactacatcgccgtctcgggagtgctgtcgacgctcggccgcgcaggcgagaagccccacgccccaggcaacatcctcggcgacttcgccggcggcggcgcagtctgtttccagggaatcttgctcacgctcatctcgcgctcgcataccggccgtggccaggtcgtcgaggcgaatatggtcgacggctcggcgtaccttgctacgttcccgcggttggcgaggaagactcccgcgtgggcgcagccgcgtggcgagaacctgctcgatggtgggtgtccgtattatgatacgtacgagactaaggatgccgggcggtattttgctgttggggcgttggagccgcagttttatgcggcgttggtgcgtgggcttgggtttgagattggggagcttccggagagggaggatcggacgcagtggcctgtcttaagggagatttttacgaggaggtttaaggagaagactcgcgtggagtgggaggctgtttttgatggtacggatgcttgtgctacgcctgttttggagcaggcggagcttgaggagggtggctatgagcagcggcctatggtgcatctggttagtacgcctggcaaacccatttcggcggacaatggtgggtggtcgggcggcgggcttttgcctggggatgggggcgttgacacgcttagggagtgggcggggtgggagcagggtaaggattttgaggttaggaaggatggggcttttgtggcgatggatgggaaatccaagatttgaggcggtgcatcatatgttcgagataatttagactatataactgggtctaacgaggtagatatatacttcagttcccctttcccgagatcaacacatcgcaggcattgaacttcataaatgccaaagccaagtcccaaaaaccatgcattatcattaccattaccaccaaatgcaaacaccagtctagatctatagaccatagacaagaacagcatgtacagaaacaagaacaagagccaatacgggcgacaaagcagtgccgccaatagcagcgacaccaccattactcttctgactatcactcttcttcgcgccaacggcactactagaagttgtggcatgagccccactaaaagccggctcgggctccgatacggagttataatattcgcgaatgatatcgctcgcctgttcagcgacaccatatgtcgaggacatcaggtgcgtggacaaggcaatggggatgacgctggcatccgcaacgcgcacgttagcaagaccgtacacgcgcagattggcgtcgacgacaccgccctgcttctccggcagcatcgcgcaagatgaggacgggtggaactctgtgccggcttccttgcgtagccatgctatccagtcgtcgtcgctctggacggttgagcctggggaggtctcgtttgtgaggcttccgctcattgggctggtttcgccgatttggcgggcgagtttgatacctgcgagcaggatctcggagtctgggtattgttagtgttggggacttggtttgcatgttagatggggtacataccagctgggttattcagatagttcgggtcgattacagggtagtccattgggtctgaggagttgatgtagatacggccgtggctgaatgggtgttggagggcagctgtgatgccgatatcaccgtttccatcgctgttcatgaacaggagctcgatttgacctgtcgggcctttgaagatgtttgatgtcgtgttgcagattgctttgtagccggtgaccacgccgtcgtcgtaagtagtgttcggtgaatactggtcgattgagtcgaggaatttcgagtcatattcgttgactttactgccgtacatagcggtcgaattcacataggcaacggcagaatcaatgtatgtgaggaatttggggttgttctgcgcgaattagcatctggccttgtttgatcgagtatatacaggacgcaccctatctttgccgccgtcgtaaaagatagaacctgcggtgtccacattcgagctccatttcaccgtagcactctgtaactcggtcagtaatgctcttcttatatataggaagcacactcacaaaatggtcttgaaggtgttggccgacaccaggaagttcagatacgaggtcaacaccagccgcagagaggacgtccttcgggccgacaccgctgtagagtaatacagccgggctgccgacagaaccacccgctaggatgacttccttgttaaccttgaccttcagtttcgttgctccgccatcagtcgtgtactcaacagcactcgctgttttgtcggaagaagtagaattgtcgaaaacaagccgagtcacatgcgcattcgccaatacatcgtagttatcccggtctggaagcggatcgagatacccagaacgactgtaggagcgcgtccaattcgaagggttgatgcatgaggttgagacgtccgcgcccaggttctcacctccgtacatattggcagaaatacctatccccatgttcgctagtgacgttaaccagtagcccacttcggggaatgtgctaggaatgttagccttatcgatcaattccagagaacaggattcagcatactagtccgggtatgatgtatggatcggcccgccggtgccatgatttgatgcattccagacgattccagcctcttgaactacatcatccaccgggggagagaaagtctcgctttttttcatagcagcgtagaatgagtcccacgaccagttatcggctccgtccatatcaccgagcatgtctttccaagcattgatttcgtcttcacccggacgggtcatgtatagtccattgatggcggagctgcctatatcatatctccgtgtcaatcttatgttgcttattctttgggatatcaagcttgtacatacctccaaggaccttcccacgaggccactcaatctcacggtcgtctgcattagtctgcgcaacagtgtaaaagtcccaattcaaaggagtcgtccataatgaatcgaaataagcatatgccggtgtatctgtacgagcattagaaatcgcaaaccccgcggggtcataattaaacgcacctatgcgcttccgataatcatctccattcccgcccgactcaagaacgagtacggtatggttcttatcctccgaaagacgagcgcccaacacgagtccagcttgacctcctcccacaatcacaaagtcataagaatcgtcgatttccgtgcgcggcgataatgcgttcgcgaagtggcttgcgactaggctggcgcctacgatctgagtagcggatagaccagtccgcattgtaagagtggacgcagattgtcgagagtgggtgaaagggtgtatctcatatataaattgccgatcagattgaccagggttaaggctgtggagaaaaacccttgaaaatcttgttatgagcttgggaattcccgtttatcaagtttacgcgcaagatcatcccagataagcacattctgaagcctcaatcgcgttagacaggcgggtcaatattggggttctacaaatgagatcttggttccgctttctccacatggccttttccaatgagtcaactttattttcgaggtacccgtcctggttccatgtttagtatcgctgttcctggatgaggtcgaattggtggctgttggtcgatatgacggtcaacccgatatccccaaatactcaatgtcgcatcaccgacaacacatcagtgctgtgatggcacggctggagatatggttgctatgcatcaaccgcggatccagagccaataatggcctagaattatctccactaacaaagaacacattgacggtgggtctcataacatattctcataggctgacagttagatgatcgcaattataatccatccagtagccagccacgataaaggtgtgtatccagaaggttagaacaaagccccgtcatagtgtctggatttccatggacatgagatgaaacatcaatgacgaaacagggaccgatcgatctgatcccaaattgcatgtttcccattggcagtgatcaagtaacatttattcaacatgatctcaaacagtggaggttcttagggttacgcttgtcagctgcaatttatttactttccgctaatccaatctgagtctggccctgtgactagccacgtcgctaaagttcgacgattttacgatcagcttcttggttcgatccattttgaagagactattgattttgagtagaaatgtggaaagtcacactccgtatgtagtaacattggttgtacaaaaatttttaacccctgaattcattattccacggttatatgatccatggataaagccaaatgaataatcgttctgtccttggattacctcgcagatagattctttcaatcacttgactgtaagggtcctgtgcccctgtaatagcatttatgccagtattttggtggtgtttgtccagctatcgcggctaacttgatagactacaatagacgatctcccttctttgcccagttgaaaaaaggaaaaaccagtgatcgtcagtaagaacacccaaacggtgctatccgattgtcattaggacttccggttggcctggacattgccatacgtgttgaaagttgtgaaaagatgagatttgaacggaaaggctgctggttgaagtggaagtcgaaaagtaaagtgcattggtcgaagcccaaatggggaataaaactttgtataagtatgaggcgtagtacaaagagcatctcatcactatgtctttttagtaattttcttatctctatttttagatctcttcgtagatctcttctcgtttagcagcaaagcttcaattcgaaatacgctagttaatggagagaagaagtaaaagcaatatcatgaaaaaagtaaacatgtagcaattacgtttcatcacacaggcatagtcccaggggtggttgcaaatgcctcttccaatatctccaaacctctaagcagctggtcctcagtgatagtgattggcggggcgatgcgaaaggcacccccaaagctaggatggctactgagattggcccacaagcctaactcataagcccgatccccaatcgccttacccaaagccagcgcagggttcttggtctgacggtcctcaacaatctcaacccctgccataagtccgcgcccacggacatctccgatacagccgtacttgtccttcagtacatttagccgctcatggagtaccttccccatagcacgagagtgctcaaccagcctatcacgcaccacaatctcaagaactttatcgcccacagcagtaggcagtggatcattaacatgggtcgtgtagaagcagaagtcccgctcgacgcacacgcgctcgatctcagcactcgtaacgacagcgctgagcggcaggccattccctagcgtcttgctaagggtgaggatatcaggaacgacttcctcgtggttgatagcaacaagatcgccgcaccggccgattcccgtctgcgcttcgtcgacgatcaaaagcattccacgcttctcgcactcccgctttagagccttgaggtaccccggtggtaggacatgcatgccagccgacgactggatacactccacgatacaagccgccagcgatccgcacgattgcatatcgatcatgcgccagccgtattccatctcggcttgccagtcgtaggatccgtcggcgttgcgaaagatggagcggtatgcgttgggcggtgggagcatcagcattcccggcatcaggggaccttgacctctgcgaccgaagtggtattgtgtgcccagtgcttgcgcggtcacgccatgccaactaccgcctagtccgacgatctcgaactttccggtgtataccttagccatctttatcgctgcttcgttgctctcgccgccggtggagaggaagaaggctttgtcgaggccgggtggcagcaggtcgcagagacgttcgcctaggctgatcactggaggtgataccattcctgagaagaggtggtctagggaggctgcgtggtcggtgattgtctgtacgatttctgggtgcccgtggccgagcaggcaggacatttggccggatgtgaagtccaacactttctgtccggaggctgtgtacacgtagagccctctgctgccacagatcacgtctttgttgaatttggttccatagttgaggaggtactttgctgctttggcttgaagttcttgttgattgacatcattatacaagataggattatcagtcttcgcgggcctgattgtgactgtggactcttctgtggtgattccaggggccatgacggggatatactactgacaagtatgacgattctgacgattctgagtacttatctctttttgaggactcacggcctctttaagtttcttgttcccctcattgatgagttagggtactttctcctctttcgtcttatcttagccgcggagccgcggccaacaggtgtcctcgggcatcacaaagttctcgtatctaatgaagagacattaagttgctaggaactaaagcgaaacctattgataacgaagccaggttcaagcaatagctgggtttactgccgaatacctttactctagtatattccttactccggacttcatcaatttgccacttttatacaaaaatatggtaaatcgaagcttcattttcccgtaatctgctgtttttgaatgatggcatgtaaaatattctctgagaaggtcaagtgactttgggctcacattgacactccaacggatgtccttgagccgccttttgttgacctggaaccttgaaacaatcttttaatttatgatactcggccgcaagtgtattggatcatccaatattaatgactggaattacaggtattgtagaacatcgttaaacgacctatagatacaagaacatgccttcaatatgcattaccatcaccactctcaccactctcaccatacctcaaatcattcagtccttatacctattggcctcgataggaatagcacagccagcaggtgcacgtagattgacgtagtcagctatccacggaccctcccctctaccgtcccaccatttcatttaggaccaccagcaggtccacagttgtattgcagttttctgtcagagtctccaacatactgctgaacaccatgattagtaacattgatccctcgtccggcaacgctgccaacttgatttgggttgggcgcgtatacaatagcttcgccacgttctataatagtggtgccacctccacaggcacaagaattgacttctttcacgttgactgtgaaagccgtgacggcctggtagaaaagaacacagatgtctccacgttcagcgggaacaccattgcaggtgaccgtgttcgagactgaataagtctgggaatcggagacactaaatccaacagaatcaaataggttgctgacgcccagtagttcactagtcgttctgtatcaacaaaggtactatccatgcggttcttagcatagacatagtttagtatcatcggattcatggcttagcggtattcgagaccaattagggctagcgtagcgctaagaggctctcccaaatcccggttcatagatcgaaaaagctcagctgccccacaaggagtttctagttggcaatacatggacccctctttcactatgtaatgcaaggccgtggagatgctaccataatccatatcctatatatctcaaacctataaaaagtactatatctaaattgactgaccatggtagtattttgctcacttgaaagcgttaatcgagtctaacatcctaaagaaccatcaccggaaaatcaccggaaactgctatcttaggcctagcttaagttaagcaacggaatgccgtcggtaccctgtggacctccacggcttggcctccaagatggtcaacgtcgccccgcaacacgagtagcttgttaccccgtagccataccctagtctgacaaaagtccctgatcgggcacatctgatgtactactggccagtctgaatatttgatctctgggtcctcggagaatatgcatattatcaatctcatttccaaattgtggcatgagcaccgaactggtcctaaagtcgaatggcgacaactttggtctgagactcattaggaaaatggcgctttggacgtgaatatgtgttcttgctcccaccttttgagagggtattagcacacttcatttatttcctaccatggtctctacgacgaggagcatatcattgaatcaagacgagttggtccttgaggaatttatttttactatcctactaaatttagccttgggaatgactatatgtacccccccccccggtggcctgcctgaaatttcagtaccaccttccagaatgggtgcgatcatgggatcataatagggaaggaagtcaatactactaaatttaatacactctgaggaaactttgacattactggcaatcatttgacttccatttcgaagttacgtggcatgaaacggaaagtttcaactcacatgccatagaaagaacaatagaatcgacagtaaacgggttcaaaattctatgcgtcaacatgtgtccatatcataatatatttacccgaaagggccatcgagaagcagccattgttgtttgttctttatcggtaacaattgcacaggaatcttcgagattcaggaattcatagcttcagcagacaaattagaatcacttcgcagatccttttcatcatcgaaaaggcaaatccaagacgaagcttgatccagtagcagcaaagccgacaatagcaatagagctgtgaatcatagcgattcgtcttgtatgtgcagtccattgacatcacccaaggcttcagcttagctatagcaacgccagcgacacggttctcgtcatcgtatttgaatatccattctccacctcccagaagctccacagccgtagatagtgtgatgactagcaagggattcagcaggaaccaacaagagctcggtgcatacgcaccaagttcctgttgcacatgatcgcgcgcgcggagaatgctgctttgacatttgcatcgatatatctttgcaggaccaccaaatcccttggagatatgaagaagggttctgaaggaagatggagaggacaaaacgagtgtattgtcggggtcatatgctgggcacatgaccacgcatccaacacagccccactataaattcgatgattcttgttcgttgatgcagctcatctgttgcagaaatctctccaggagtggcattttgtgtcgagccgtgggcttgttgccgcaggacttccatgttggagacatggacaaaatcgtgatcgtatatatgggcgagaacatatgaagaatgaagatagttgggagtttaaatatacgacaacgaatctcctccgatgagaaagaaatcatacatgaggcgtagaaagagctgtttcatctgcaagttgttgaacgctgtgaccagtcgaaccccgatcatcgactgcgtgggaacctggcgaaccgtctttgctcaaatgaattttgtaatcttcttcccagatttcaatgatggtagtaaagataatgactggcagtcgaaccgacaaaagaatggagtggagggttaatggaagatgaacgaccgtgtagatggtagaggttggaaggagatgttgtgcagagataaatagtgcgttggtgaactttgcgcgtagcaaggaattgaggcgacggcgagctcacgttgagagcattgaaagcattgaaagtgttgaaagcgtcaatgatgagctagctctcgacggtaaccttcttttcaggtgctgatgcttgcaaagatctatcaagtgccatccaatatatcgtagtaattaaagaaaggaaaaagaaataaaaagattgcttttgacatcagccagaggatgtgcttataagaggataggataagggagatgagaaataactccccagagctaacattataaagcaaagacggggacaagagaatgaagaaggaagtgagcgaaggaaaagagtcagaattaaatacaaagaagacaaacaaaatgagaacctcaggacgtaattggtgcccgaggcaaccgtacatagaaagatatatgtcgctctcttgcttttaccctcaaaatgctaatctcgaatatattcagtaggatatctatattaaaacattctaacggccccagaaggccttttggagcgcatcacacatcagagtgatacacctcttgccctcagacaatgccccatccatagccaagaacggatgtggcatacccggcatgacctgcaagtcgacaggtacaccggccttctgcaacttctccgcatactgctcgccttccgagcgcagcacatccagctcgccaaccataaccagcgcaggcggcaattgcgagtaatctccatcccagaacagtgggctcgattctgggtgggtgcggtccgcgtcgttggggacatagtggtcgcggtaccagtacatcttaagtgcggggagtgcgggggtccattcgtatcgacgatatgactcgttgttctctactgtggcagtgttgtctgtcacgggaaccgagagcagctgagcgaggaagtgaacaggcggtgacagagtcagtgccttgtgcgtgataatcgcggcaaggtttccgcccgcggaggagccgccggttgcgagtttggatacgtccactgggagtgcggcggggccgtcggcaatcaaccagaggaagacttcccaacagtcatggactgcggccggccaacggttttcgggtgcaagactaggagaaagaatataaattaggccgaaatttctcaaggttatgtatgcatggcgtgattaggtagcttaccggtagtccactgtaatcacgacgcagttgcctcgtacacagagattcgagcacaccacattttccgtgtcgatgttacccagcacccagccaccaccgtggaaatacaacatcaccggccatccaccaggaggcgcttcgcccttgggagtaaagcagcggatgggcactggtgggccctcggtagctcgccgctgaacagtaatgtcttgagtcttgccaacctccagcataggacctgcaccaggaatcaagacaccacttgtccgtgacgcttccacgggccgaaggtgcacttgctggttattgatgacatgctcgttatagaatgcgacatactccgggtgcaacaagtctttgacagactcgtggagcgggtaaggtggttcagtaatgccggcagtcattttggcagttatttagaaaaataaaacacaaagatcgtcggcattcagtgtctttgaggtgttcaaatagggacttggaaagtgcacccccacgcgcagagtggggagaacaatgcggggacacgctgataagctgataagccgattgcattccgctttgggaaaggatcaacggcctatcgcggtgggccagtgccatctcagggacaactgcccgccgtctcttttatttagtatcgagtgcaacctgcatgtatccactgcgcccctcttaacgtccataacgggccacttcatgttcctcggatcggtcttatcggccactacggagccacttgttacgttttaatctcggctaacgtgggatgtagctgtagctccggatgttgccccccgttgataaaaggacctcccacgcgcaagggggggcaacttcctacttctttccatcttttctcaattgactcacccctaactcatactcccttcacctctcacagactttcacaatgtcctccaagaccgccgtccttaccgacaaggcccccaagcccctccccgggatctactcccaggccatcgtcgccaatggcgtcgtctactgctccggcgctgtccccatggacgccgtcactggcaagctgattgatggcgatatcaaggctcacactgtaagatccaacaatatcaattgacctaattcaacctgctaacaccctattctctaacagcaccaatgcattaagaacctgacccacatcctcgaagaggccggcaccgacatcaccaaggtggtcaaggtcaatgtgttcctatccaacatggatgatttcgccgaaatgaactccgtgtacatgcaatactggggtgatgtgaagccctgccggacgtgagttcttaccccgctcctgaatcccttgcgttggagtcatttggagtcatgctttgcccctccatttttgtactctgcgtgatgcttgcgcttgcgcatacagctgtgcgactctgtatgttttatggtttgatttgttgctaaagtatatactttgcaggtgtgttgcggtcaagacgctccctctcaacactgatgtcgagattgagtgcattgctgtgctataaattagttctggcttttattggaatcaatagacaaaattcgaaaatgattatatgactactaccgcagaccacctttcatactattgcagtaactttgcaaaccaactcggatgaaagccaagaccttgacagaccgccgattatcaccgcttttccattaaaggcagtctgtgtacttaccccgcgatgcctgatgtattttctctttgtacaaaacctgcaactctactttcctatttcagcttaaaacccgtcgctaccataaatatgatatattaagcaaagagtacgacctagcaacgatgagccaatcacccgatattttcactcaagaaattcagcggctgagagctgattacgaggagaaaaaagaccggtccaacctgggtttcggtggtgaccgacagataatcgacctcagtttggaaactgttgatggtgtgttctgctacacgtattggtatgagggccagtgtatccggctaggtgatatacctggcaccatctctggcgatatccttcgcctagaccaaaacttgcccgtttcagttgacaatggcgactatgaaattattggtgaccaaatacgtccgctcaagaatgtaccaccactcccagagcacgatgatgactccgaggaacttgatacgattcttgccttgctgccaatagttgaagtcgattccaacaagcattttgtcaaggaaggcaaatacaagagtgagatcaagaatctgcttaaatgccaaggtggatcctgcccaggggtgccgaaatcatcccacatcatccaattactgggaaggtcgccagatggggagctggtgtttgagaaatttaaacctcgctacgtcttggcgaatatttatcctctcgccacctacaaagactggattctacagataatctccgggctaaggatgctccattcacttgggatcatccatcgtgatctccgcatcgacaatatcgtcttctcctctgacatgtctcgcctgcttatttgtgatctcgagagtcgttggggaaatcgcctagcacccgaggtttctcgcgagccggtgttagattctggctggactgagaagtcggatatctatgaccttggttatctcatcaaaggcatgatatacgggaacgtcccgtttacgaacgcggtggaatggcatgtccccgcccctctagctgccgttgtggaggcttgcactcgtaataggcccgagggacgcccaggtttgtatgaacttcatgctatggttgatgggatcgagataagtacttgacgatatcatgaatatgagacctcgggacatctgtcacattgataggcatatacccatgatgtatctgaacgtatatgattttattttcaaaagcaaacagtgagagggatggagttgaaggaactgtttggaatggtgaataaaaacgttccaagggaggtgtgtcctcgcccccctgcaggtgtatgtgggaaaatcacctaggcagtcataatttcctatattccctttattccagattatttacatacatgttcattcttcccttgtaattttcataattaaagagacaaagaaaggacgggcttattgggcaaatcctcattaaacggtgcataatgtgcggtgggtgtattaggaaaaacagtctagtctgatataactttgtacaatgcctgaagccaattgccatgatagcgattttgcaatctatgcaattttccaaaatttctaaagtcggtgtttatcagacaaaaatcggggtgggggttacagtgggggtatggtgggtctgaagtgtgaatagcttcaaaatgatccccaaggggaaataaaaaaaaaggccgcagaggttcttcaatagcagttagccggacattttcctcattggcataggatgcgcctcgctcagtgtatgagacaccaaagagtagggcgctgagccatgggagttggaggttataatgtctgggttgacctttccattgataatcgctttagctattgtttcttcctcagatagaaacccaggaacaacccgtgccttccaatagttgtagccaactgagctttggggctacctgaggagaatatcaggcaagaccgcatagttcagaccacatagttcctatatgtagggaaaatcccctctcctgactccattttctgggatataaccctaaacgatcgaaaagcagtcagtgataggtcagttatctctttgggcctcttgtggtatagcatttgatgtttgactgactcgatggatacttcggtaaacattcagtattgttatatataacgactgagttcattaagccgactatagttcataaaattctgagcgaatatcaaacccgaactctccataatagacaatctctgtccaagacttaattggggaattatatgacgggtgcctttcggtggatttgtcatttgtgtataaaaacaccgcgcattggggttatggctaggatgagcagtttatcagaagcgcattccacaacgtgaaactatcagaaacacttcattcaggtgcctgtcaaatccgtcagattgtccatgaatccaggttcgtctggtccttactggcaaggtcaacccctctgatcacgtgccgtgcacagattcggaacattgggagcagacgaagcgataaccgtttaccacagaattgaaagtaggaaaacagagattctttttgaaagtgtgcaagcttgattccagtattcaaataacttgttgcaattgttggtggtcggagttgttgaccacgtcatcgagggatccagggcacgatcgacttcatcctactttcacctccaaggacaacccttcgatgcacggagaatcattacaatgaattcttagaagatcgaaatttcttcaaatcttccattctcagggactgaaacgaactgacatctgtacagacaaatccacagggatacggctactaacagtcaaaccctcaatacatccctggcactagcaagtcctcagcattccaagctatcaagctaagatggaataccctttaaagagagggtcatgctcaatgccttggattctttcgacacacgcccctcggctgctacattccacccctccacgctatattcgcgtcgacgcgctccagggctaagaacccttcattaaagtactctttagcccttcaacactcctctgggtaccaaccttatgtatatgctatcatttgcatccaattgatgaacttggagtgcgactacaactgggttcgatttgtacacggggcattcaacacgcctgtccgttacctactacacactcacattcttacctacccggcttccgagcaggcagtttaagagggcgacagacagtcgttcttctcttgatcctctcgagatatcgcaatcatggcttctggattttcacctacaccacgaaaggagggaacatggacgaagcttgtgatatttattgcgctatacttgctactcctcgagtctatattggaatgcgtgctcgtgctctacctttacggtaatggccaggttgactcgaaaatgactctgagtgttgtacttgcacttatcgcagtatgtttggcttgaatctttggctattatatcgtctcgctgactcttattcagtcttttctctcggtaccgcttgtcagccttcaaagcctggttgcttggcaatacaacaacattggtggatttggaacccaaaagactattctgcataatgtatgcacatacgtgctgcgcttggatcttatgctttggctagctacaagtatagctggtctagtggtcgctgcacaacaggtgtactgtcttccggaagggacagacggatccttctggagagttggtaaaagctgtgccttccaccgagcatctgtgattgtggctgtgatttcaatgtatgcagcatcctcgttccttggcttctttacttgaactgacaatcctacagggtcactgtgtgcactatgtactgtgcaagggagctttgcgatcgaccatatgatgtatcacttcttggtatctacaagcgccagaaggttctcagagacggcagtatcgtctccggcaatagctgggatagtgaggaaacgctcaagaacgagattctctatctttgccgccaacacgatggaactggagccggggagttctggtctgcggacccaatcgccaacagagtcatctgccatcccagcgtccggcatcctgctcccgtccgtctgcggcctcaactccgagtcaacactgaatccggttcaacatatggagaaattatgtctggaacgacgatttcgccagaggacactcaacatcggatctcacccggatcacaaagcgtggctagcgagttctatcccatctcgagcacatctactactatgttgagtacgcagacaaccaacgagttacgcgctcttctctctgatgcgtttgcccccaaactaccggccattccccaggaacacaccagccataagagaggaaagtcatcactctcttctatcagacgtcttcttccaaagtctttcccattgtctcttccactatcagaggatcctcaaatccaagccctcgcagaccccaacaccgcatcagacgtcgagaaacaggttgtgacaccaaatagcatgcctaagggtatccctcaatcgacaacctaccaacttgtcgcaaacggcaacactccaaacgcctcttcagcatccctcccgcaaagccctgccaacacccagcccaaattcaacctagcacaggaaggccacacccgaacaatgacaatgaactccgccgacgccccagaagtagtcccaacaaccccgtcctccccaccaaaagtgcgccgctcccaaacagcatacgccataccggaaacgcgctcaatccaccacccacaccacccaaactacatcccacgccccccttctcaaccacaaccacgagcatactcccagtcccgccgacaagctcccggtccaaaaatacacccagactcaagacgcaggaccatgcgaccccaacagaacatcatccactatccctcccgcagctcatcctaccacttcgacccaaactacgtcccacgccactcgcagagccagtacaacccccactccaacccccacgctagcagcaccagccagtacggacaccagtcatcgcgctgggccaaccagcgccgctacggctcatcagcccggtccatgccggcgccgatcccccgccgcagcgacgtcgaaataatctaccccagcacgcgtcgcccgcgcagcagtctcccttccggcgcgagtggtccgctcagctgtatcttggagacgactgaccccaatgcgtccggggataatcacaggcctgtctcggctgcttactctgagttgccgtcgaattccattgatcagacgaaataccggggtgcgaatcggacgagtttgggcttctattgagggggtctttggatggtgaagttggaaagagtattaatcgttgtttgtctgcgggtcggacattcttagttctattggtttactttgtaatgttgtatgatttgtatcagtggatagagatagatagtatgcccagatgtagcagggtgacttggttacttccctacttttagtgttgtagttagctttttgataccaaattgaatttgttatacaatagaaagacgaatattcaaacataattaaggagcgaagatacaaagatcagtacaaaaattgatttcgcactcgaaagcagcaagatgcaaaatccgcctcaaggcgacagcagaacacaccgcaaagacatgcaatttcagatcccaaattccattccaggaagtacaccagaccgctagaaaatgaatcaagagaaaaacaatgcaatccccaacctgatatggtacataaacacaaaattaaacaaacccatctaagccctagtctcggtgcttttagacttctgcttctgagcatacttgtagcgataagcctggccgctcttggcttccacatcacggtctcggtcacgacgacggctctctttgccgtgactctcagccaaagaccccggaccccgacccagctcattctcgccccagctcatcatcaaagccttggccatgcgatctcgctccttgaggaggaggtcgatgcgccgctcccactcgcgctcgcgcttgtccacagacagagcgatgcgctggtccatcgcggcggcggtttcgtcctttccggcgatgatgtcttccaggcggcggagctctattttgaagctcttgcgtaggtggttttcggaggttgcagatgaggcgcggagagttgcaagttccgagcgtaaatcggcttcgcgttgctcggcggctacgaggaggttgcggattttgcgcattgactcggcgtgcgaggcgcgcagtgttgagacggctgttgagtgtgcggtgtgcaggctgcggagttggctttggtggtttgcctctagggctgcggtgtccggtcctcttggctctgggttgagagcttcgcgcgctgttgggggtgaagggggtggactaggaggttcgacgaccctgtcttcttgcaagcgggcgatggtctcgagggattcagcatgctgttcttgcgactggagtagattgtgctgggacttggttagggctgttgtgagctcgcttactcggttggagagtcgcgagttctcggtttcgatggttttgatgagggtctgagcttcagtcgcctgatcacgcagacgagctgcttcggtatctgcagctttctgggcggcggataactcccggagttcttgctgaaggcttgcaatgcttggcatgtctggctgttgcggttgctgcacgccttgggtgtccacgaacttgtccttcaatggcgagtgaagtggggatgtgggatcccctgggcccaaatctttgatcagatcgagaatctcgctgtaggtgctgtggccactgacaggcagatctgcagcagcagctttgagagcactctcctgggcttccatatgggtttgaacacggctgagattttcttccagtgtgatgttcttttcctctagaggtcgacttctaacttccaggtcgatatagcgttcctcgagaacctggaaatcattatgcgcacgctctaattccgactcgagcttctcattctccagtccataatcatcgatctgtgcttggagttgatcaatctccgagttcttctcctgtatttgtgcatccttagcccgtgtgacttccttgagcttagtgaatgtctcatctagagtttcatcgcgctttcgcacctgctcttgggaaatattgagttgctggcgcaggtgagcaattgtctccaatcgctccttgtccaaaggagtctgtgcgtctctgttttggagttgctgttgcatctcacgaatctggttcaaaagaggattgagatccgttgtgttcatgctggactggcgtaatagcttttcatgttcctcattcttcttttgaagcgactggacttgctcgcgtagcattgcctcgttgctacttttggcattcatctcgtccaagagagcattcttctgctgcaattctgtctggagatgacggatctgctcactagcagaaacagcctcgagaatacgactgcgatttttcagcaattgattgtcgcattcattcatggcgtgttccatacgtgcgatctgctggtgaagatcctcattctgctcctctggtgcatgactggaggcgtccgacaattttcggacggaaggggatgcagaatcctgggcctcgtcatcgtcggggtattcttcaataccttccagatgggttgaatctttgcggatagcgctagtccggtgcaacaagtgtgaaggagtcgacatatccactggcggtccgaattcactgtactccccagagtcggcttcgtcttcgatgaccggttgcttcgatttccggaaagatcgtcgtactgatccgtagtctacttcagcttcgtcctcctcctcttcgtggtttgctccatcctcatcgcccatcaggtatttctccatattcgcagtaaagtcctcggggcctccaacgtcggataatttatctacatcttgatggaaagggggtagagtttcgtcgttcccatccataggaaaatggccgctcgggaagttgctgaaatccaaggtgtaatcggcaagacgcgcatcgagatctgagcctgtcgggcttccaggagaggcggggcgagagcgatgttgcatttcattatcggaatggtatccatagtcacgagcctggtcacgaccgtggtcgctacgtttcgctgcgacgcgctcggttgaaggagtctgggcggttgcaggagtttgggcgggggacggagatctcaatgggctggaaggatgctggggaggagaggatggcatgaagagaggcgtcaccaatgttgactgtccaatggtgtcatgcgaggttggaaatggcgaggtatagcctgtgttggccatggttgcgcacgcgtgcggatgcgcaaagaggagggcaaccggcaacgataagctctgccaatttagaggtcaaatacaatccgccgggttgcactagagacctccaaaaagaatattaaccgagtaaatagagaaataacaataaccacattgcggggagaaaaggggagactgaagaatctcgcgacggtttgtattggggcgcctgaggcagcaatgtttatctgcctttttaggtctagcggacatttgtactcctttacttctctgttcatgtttattcattcttttctgaaagggaacttatactttgtataatcgtagatcatatatgtccgcctactgacgggtacatatacccatggatggataactatacgtacacaatatggtacatgttgatgattgtaagatgatcctatgatctacctcaagctaggggggtctggtcacctgactaagccacgttgcagttaactggacactcacgtgcagactttatgcaggcaaaaccacattgaaaacgctattcatcacatctaatcttgacaacagttgaaattcaagtatagcatatttgtccgaaatgctagatattcattgtgcttcattggcgtccctgatctagcatatcttggaacaaagcattgagactgctcgccatcggccctgccgacattaactggcgagctgccacgacaagatctttcatacccatggtcaatgtcatctccgcagcccactgccacggttccgccatgcccccaggcagagcattgtaatactcccaacccataacgccaccaaagttgggaaactgctcaatcaacattgccagaacaggtcccatcctctcctgagacacataaccctgcgatccattacccgggtttgtcaacaggccgtatacaatccgtcgcggagaccacccctgggcaaccatagtagcgtacatccgtggatcctcagcaagaccccagccattgtagaactgggtattgtaccagctgatctgagaagcacgagcctgctcgagttcacggtagtcgaaccctgataagttcccaataccaagtaatgcaactgccacaggggccagggtaatgatgaatgcgtcgcccaggtcagccttgagccggtcgatgagtcggacgatgccttgcaaagacatggcctcttccacatcgagatcaattccatcaaggccatggcggcgaatcatggtcaggaaaggataataaaattcttcaaattccatccggctgccgtcaagccgcgtgaaggtgcccggggcggccccgcctaacatgcccatcactttcacgccttgccgctgcacgactggcacttcggcccatagggggtcgaatttggggttgtctggtggatcatcgttgagagtgatgtcccctggtgcagcgttcaagtgaaaagcggcgagaataacatgtgttattccggtgttgttttcgaggagcgggagcatggagacatactgacccccgcctgggatgagtgtttggtggtacaagatcacccgcggacgctcgccgagtccacctcggatcggtggcattttgaagagagcaagatattgaatacccagctatgtgtaatttgtaggaaattattccatggacttcgctttgtgggagctgacgacaagcttgagctttggcggttggtagctgtggggggttcgggatcctccaagctcctagcgtccgagagaaacgaccacagagaagtaaatcattaatgaactccagatctatgcaatggcaaattttaaatcatgtataggatcagccggggaatatcgctgcaacacaaagtagtagatcgggctgaacacctgcgcacgataaacccaaatactcactgactaagctgaatggtagatccatttttgggtaaggctaccacctgggcagcgcttacaagggactatggctattgatttgggataaagtaggctaagtacttatataatttgaattgtatgggacttctagggcatccacttcacacgggcctggattaccgcctcaatactagaaccatggacactgatccctatatccatggcgttgaactcggctcattgggaagagctgaagaatgacatcaaattttgattccggattagtcctccagcaaattgaaacgaacaaccaggaacatagtgtatctcaatgtggacttcccagacatacacgaatgacatgtatccatctcacgagagatagaaaatgaaccagtatatttcaaagggaatgtcgtatagacaagccataatcgccttcgatgagctgatggaggcaaactagtcgtctctagagactacataagttgcaggccatgcccaccgagccttgtggcgaagcaatatcttcttgcggggcagcatatacttctaagttctggtatcaacttcaacactcaatatcatgatggcttttaccatcagtactcggatcatgtcacgtccgcttcttcggctgctgccatccgcacagtctgtcaatgttggattgtggcatcgttgcagtgtcgccacagcatccaatcatccacaccatcctaaccctgggaatttttcgaatcgtcctaaacaagagctttcagaaataggccacaagggtgggaaaaaaggcgggaaagctaccggcgtgggtgggttccataatatggattcagagaaacaggtgagtgccacaacatcgatcaggaaaaagatctttcgttaattgtataatgcgagtaaacagcacgctatcgcttcaaagggcggtcatgctggcggtcatgctggcagtcgtgctggcagtcgtgctggcggccgtgctggcgctcggggaaaggcagtaggcaatggggaaactgagttagaagccgaacagcacggccggtcgcatgagccttcggtagttgcacctggatttgaagaatggaagacaacggcttgagtttcgattaatctgatttaagaaacaatttcatacaaatggacgatcctatgtttaatacaagaggtgccaaagctgcaaggtgcaatgacagacatcattgtatagcaataaggagcaactttctgaaacataaacgaatgtcaaaaaccaaaagagaaacaaccaaccaaccaagctcgctacgtccgcgcgacgaagattagcatatcgagcgaatcagatgacgtcttcaatcctctgtagctgcaggcaaccagctggtcatcttctgactgtggagggaccccacgtccgatttgcggctcgccagaaattgggcccttgatgaagtccgcggtgccatactccgctgggattggctgttgcgcaatctccagtgggggatgcttccacttcgcgatccaagcatcccaagattcggaatttagctcctaaagcttggtgctacataagtccgggtctctaaagaccatgatcgcgcctccaagttgaaaattttcaattgcgtgcgtcagcgagtccgtggtataaaagctaggacaaaattctttgtccgcattgtggctatgcctttgaggaataaataaagccagtgttggctccaatgtatcgagacttgaagctgattgtcaatagaggtgagtggtgtatctgctgatattgaagctgatattgaagctgaggttgaagctgatgctgagcttaatgacggtatttcggtgagtaatgagagagtctgggggatggtggtttcggagccattttgcgaaatgcacgtatcagatacgtggaagaagagaagtgatcaaccaaaacgtgatgatgaatgtgtcagatcgatggaagatgaagatctagctactgcgtgaagctctttaataaatttatacgaataaagctacagagatcttatcctctagaatctagaaaaaagatctctgcaggcggaataaagagtctgccaacacggcaatctgcctgcgagaggagagagaaggagagaaagagaaaccaaatagaggtctgcagactgcatagggaaacagtgaaagggcccaaatgtatcatatataccctacgataatcaaatactatgaatgttctgaaacagggaactacatatgtaatcgtacacaccagcaggagcgatctacacagtacatcggtacatacgtgagttttggggttcggttaaccaactgccatgaatcaacgttcataaatatatctatgcagtctcttaaaggcctagagaggtcccctactcagggattgttagcggttattctaaaaaaccccagaaagacctcaaaaaagacggatggaaagatgataacaaagtggtgtgcatttaggactttctctacggaatttacgagcgatttggatgttataggtattttagagtagggcatatgtcgagtttatgaatatgtgctttaaatagagaactactgcacgtgagcgttactagcctcagatttcacctagattataagtactaccaatgtaattaaagtaagtaactttgatttctggtcaggcaataacatcaattgtactatttatacaattcatctatacaattcacggggagttgattttcaatagcaaccaatacgattgccgctctggtccctggatacgtcatcaccctaggaaatcaccaagacaaccttccacccttcaccatctccattgtttccattgtttccatttagcatgaagtaatcttcactcttgacatttggtcatattgcctttcataatggcctccctacggcgtattgctgtggccacgagctcgacgatcatccgactgaccagcttcatatttctacgatgggtataaggtccccataggttaaccttgtgtttcagaaaactcacgcgtttacagatccctggccatcactttgtgcctctcgtggttacctctctcgtggtgtacctgtcgtcaataatctccttgctcaaggatacccagcctcacgaaagccaaacgactaaagctcgagactcgaatagtcaggctccacttccgaatgatcagaatctgagatactaacatgcttcacagggcataactccgtgtctagccgtgccaaagatggcgattctgtgcttaaaacactattgacagggctgccctctccaaagtggcccctgctgaccaggatcacaattataatcaatgtagccctggcggtcctgacacttgacttcttgacccgtggtattctactttattctaccacaaatgttgcattctcacgtattggatatgtctccccgaccactgccaacttggtctttcgcgagcggnnnnnnnnnnnnnnnnnnnnnnnnnnnnnnnnnnnnnnnnnnnnnnnnnnnnnnnnnnnnnnnnnnnnnnnnnnnnnnnnnnnnnnnnnnnnnnnnnnnnnnnnnnnnnnnnnnnnnnnnnnnnnnnnnnnnnnnnnnnnnngggcccccctaccagtggcggtcatgttccaggaggtctctgacctaagccaggactggtatgaagagggcatcgtttacaagctggatgactccaccgacttcactacaactgtgaccctgaccgacctgaagccggcgacacagtatcgctactcgctgtccaacaacaagtctggcacatttaccacggcaccattgcccgaaacttccgaatcaagccgactatcatttgtaacatcaagttgtctgaagccaaacttcccttacaacctactatcgcatccactacgggtcccgggcctcgagcaaatgaccgacgccctcgccaaactgcccaagctattccgtccatcattcatgctcttcctaggcgacttcatctacatagatgttccctggcgctttggctcaacaatgtcacactaccgtagcgagtacagacgtatctactcatccccctcctggacccacggaccagaagacaaccgcgccattgacctcccctggctgcataccctggatgaccacgagatcgaaaacgactggtcgcaaggcaacataaccgccccgtatcccgcagcagcagaccccttcatccactaccacgtgcgagcaaacccacccattcccgcagcacccttcgccgacccagacaacgtaacctacttcgccttcacccacggcccagcctcattcttcatgctagacacacgtacctaccgcaccgagccctcttacaagaactcaaccattctcggccaatcccagctccaatctctcctcgcgtacatctcgaccccagagccagccggcacacactggaaaatcatctcctccagcgtccccttcactaagaactggcacgtcggcaccacagatacatggggcgggttcctggacgagcgccgcaccgtcttcgaagcaatgtggcgcgcagagcgcgatctaggcatccgcatcgtcatgcttagcggtgacagacatgaattcggggctactaggttcccagacccggaacttaaactcggtccagatcagctgttgcctaacacggccgggctgggactgcatgagttcagcgttggcccattgagcatgttttacctccccatccgtacataccaccagacagactccgaggatgttatggtgaagtacgcgccgaatgggaatagtaagttcgggcttattgatatcgcggacgaggttgaagatgttggtttgaccgctgctgcgcctgttcgcgctcgcagctcggttctgacgtactcgttgtatgtggatggggaagttgtttggaagtatcgtcttagtgtcccattagaccgcgacgtgagtgtccatcgcccgtctctgccgccgggccgtgtggttgaggatgacattccggatctgagttggagtgtggtgcttgggactgttgtgggacgggtgccggtattggctaagcgggttgttgagacggttaatggtctttactatcaacttgcagatcgactagagaagatggagagacttgattagttcattagactagactgtttctcaaaggaagcgcctcgcttgctcggtcggatctgttcaaggcgagttgaaccaagctggtagtctcgaataatatagtagtaaaattagcgctagttcaatctaaacaatttccttttttaagcaatcatcaaatgaattagatgcccggcaagcccggagtgagatgggctgcgttgtatctcgttacatagctatgtggttatgaaggagggttttatacacggtttgcactgcagaacaggggactgctaaaccaaaaacttgacgccgtttgactttgccccctggatccgttcactggggtataagatgtagacaaaagggatgagaggagagtggagaccgaagaccaatgacgcatgcgataggggaaatgcttcttgccaatatggaagattcaagatatcgattgtcgcgaccagtaaagtaagaggaatagagaaatgaaagaaaatcggagacttcttcacgaataattaattgggtcggtagtggcgatatagtggctccaaatggaaggcgaagacaaagacctcatggctcgacggcgtcgattagaagagtccaccgctggaacggccgtgaccacctcttgtcgtcacttcgtcttcgttgcctccagcaattccgcccagcagactggcgccccagatgccggcgataccccacatgccaatacgccagccgcggtacaggccctgaataccttggccttgctgtcgcttcttctgtgaggtacgctggccgaggagctgcttggcgcgctccttctcggacggtttcgagctgacaccttcttcataaacgacatgccacatcgtgccaatgataccgcggtaagtccgcggggtagggacaatggtttccacatcggacgcatcaatagatgctgtactgatgctaccgcctgagtacttttggcgcagactcaaggatgtgtatgtagcgatctgggcgcgtcggagcacggtctcgagtgggaatcgcacggcgagttcaagtcctgagacaaggaaggcacacatgttccatgcgttaggatttaggagaggatcaatggacagatacgatttgaggaagagtggtgtcgaggtcataatgagggtaggaagacttgaatgaagcaccgtgattgggacgagatgcgaagggatcgtgcagttgggcgtggggagctggcggatagctcggacaagggaccttggcccatgggttgctggcgtgagcatcaggaatgtacgagcggtgtcgatgggagctaggatcagggcggatagcgaggttgaaatgaatgacaccaccagggttgccagaggggatgatgccgtcagaatgtccgctgtcatcgacatggaaatgtcctcttctggcaagccagcgattgccgatagaagactacggatgaaggtgttcaaggtgggcaggagaagtgagtaaatgaatgtagagttggaggacttccagagggaggttggcccgctggaggaccagagctgggataaaacttcggtcaaggagttcgagttcttgagagtcaagacatgtttagactgtgcggcagactctggtcgaatataaccactacggtcggtgatgtggtggtgtgatttacgagatcgaggtgtactcgggctcggcgttggaggggcagctgaggtgaagtaactggtttcatcatcggatgtttctgagtcctatacacaaatctgtcagtcatttaaagccatatattagctttagataacagcctccttactgaatcataagagcttccttcagtacccggcatcgagttccgatcccactgctcctctgcggcgtctggtacgacatacacctgcaggatggttttggcgacgtcgaacggctgtgcagtaagaaccttggtgtagcgaacaagcgctcggttcaatgcatcgcgggcccagtcagacaccgagggtgaagcttccagataatcggcatagtccaagtccggcatgaactcacgcgctgtgctgccaaacacctgggctgacgacggcgatgccacttcagcaggcgcatttgaagcgggcgataagccagacggggggatatagtaaggccgcaagggattgatcccttcacgagacgccataatgtgatgatgatcggagataaaggtggttcggggaaagaagaacgggaggagtggaatgtccgaacgcccaagctttgtcagtccttttttttcctccgcggccattggacggtcatcgctcgctcttccattttcgcccggatgctctttttttctctgttggctttcaaaatccccttttaatttatttattccctcttctacaacatggctttctggcgagaagttggtcagcagttgcgccgtgtacctaagaccggggatatctgtttgactcaatcgcggagatccctaagttattcaaggtcatggaggaacaccggaatcacaacacccagtcgctcgcaaaccaatgcacagagatcccttcaatcaccttggaaaggatataatacagcccggcgtgccttctcagtgactgcacaagctgcgcatggtcatatcacgccgcccaagcccggcgaagagtacgcccaccagatcgcagttcttgcgctgttgtactatttctgactgactctgtaggatcaacttgactttcatcgataaggatggcaccaaggtcgacctccaagttgccgagggggataacctactcgatatcgcacaggcaaatgaccttgaaatggaaggtgagttgagccgatataatgcttatttgaccccaaattgctgactttatcccgggaataggtgcatgcggaggatcctgtgcctgctcaacttgccatgtgattgtggatgacccggaaacctttgataaaatggaagaaccatcggacgacgagaacgacatgttggacctggctttcgggcttaccgagacctcccggctggggtgccaggtgattatgaccaaggatcttgacggaatggttgtgcgattgccgtccatgacacggaatctccaagcaagcgactttgagtcgaaataaagacactagcagagaccccgggagggactgtttttgatctggaaaaccctcacatattatccgaatagccagatggttacagcgggggtttgtggtcctattcgtcctatttggacgccgaataggactttgtactgtaatattcgtccgatgcatctggtggacttgcgcggtatcgcaaaatgaaaatctcctgtactatttttatcaaacaagactctctacataagcaatgtagacaaaatatataacaaaaaaatatcttccaacgccagaaatatgccatgggtaatcgtagatccagctcacgcctcttcgatattcaaaggctttcccttctttccattgatcaattcaaggaatccttgcttgctgacctcgttggcagccttctcccgctctcccataccaattgtgcccttcttgcgctcatccttggccgcctcctctccgcggacttgagccgcgcgcacagcattgaacagcttcacgacaccacgctgcgccatcttgcgcacccgcttctcctcctcagcgacgggaccggcaattcctcgctggatacccatcacatcacggacgcggccgcgatccatttcctctttcttctcggcgcgcattttagcccgcgcggcgttgtcgagcttctcatctgcagcctcgttgaccaacttcgcagcatacgagcttcgcgagagaacgggatcagcccgtgcggaggtaggaagtttcgtggatagaattttggagatggaggttgagaatgcggtagggtcgttgcgcttagggacagctcggccgcgattggcgcctgtgggtttgccggccggagacgagtcggaaagatcatctgcatcagaatcagacgcgtcgctttcatcgtcgtcattctcaaggtcttcgtcgtccagctcaatctcctcgccgatattggagtctgagtcgctatcgtctgattttttcggttccggtgtgggtgcttcttcttgtgtctttgccttcttcatgcggatatcgagagccgagggcttggctactgtgacacctccctcttcggcgtctgagtcttcaagactgacggggttgaaattgccatcttcttcttcgtcctcggagctgctgtgatagaagcgctgcttgacgaacttcttcttgcgaccagtgttgccctttaggccatcaaggaccttgcgttttttggaaacagcaggaggcattgtcacagaaaaatattgcgataaatgcaagcaaagaagaaagtcaagacgctgatccaaaagtgcccgtatcacaactttttttgggggcggtgagaaaccatcggctctccgattggcccctccacattgcctctctggtctctcaacgggcttcatcctcacccctccaccatcgcgaaatcattgacgactacggtcttagtctaatttattttctaattgtttacctacgcacatattcaccatggttcttcaagaccttgggcggcgaatcaactccgctgtcaatgacctgacgaggtccagtaacctcgatgagaaggtatgctatgtgtccagtgtggcccataagccagcccgctaatataacaacaggccttcgatgacatgctcaaagaaatttgcgccgctcttctttccgccgatgtcaacgtccgtctcgttggaaccctacgcaaatcgatcaaggctagcgtaaacttcgcatcgctcccagccgcagtgaacaagaagcgactgatccagaagaccgtcttcgacgagctcgtaaaattggtggacccgcgtgcagactccttccggccgaagaagggtcgctccaatgtgatcatgttcgtcggtttgcagggtgcgggtaagacaacaacgtgtacaaagctggctcggcactaccagacgcgaggattcaaaacagcgctggtttgcgcagataccttccgtgccggtgcttttgatcagctgaaacagaacgctaccaaggccaagatcccatactatggtagtctgacgcagacggatcctgctgtcgtggccgcggagggtgtggccaagtttaagaaagagcgtttcgatatcatcattgtcgataccagtggtcgccaccgacaagaggaggagctcttcacggaaatgacacaaattcagaatgctgtaacaccagatcagactattctcgtgctcgacagcacaattggtcaatctgccgaggctcagtccgctgcgttcaaggcaacggcagactttggagctattattattaccaagactgacggtcatgccgccggtggtggtgccatttccgctgtcgccgcgacgcacactcctattatcttccttggtactggtgagcacatgatggacctagagcgattcgagccccgcgcgtttgttcagaagctactaggcatgggcgatgtcgccgggctggtcgagcatgtacaggccatgacaaaggattccgcgggtgccaaggagacatacaagcacattgcggaaggtatctacactctgcgcgacttccgggagaacatcacctcaatcatgaagatgggcccgctgtctaaattgtccggcatgattcccggtctgtctaacatgacccagggtctggatgacgaggacggctcactgaagctgcgccgcatggtctacatcttcgacagcatgactgtagccgagctggatggcgacggcaagaacttcgtcgagcagcctagccgcatggtccgcatcgcgcacggcagcggaaccagcgtccgtgaagttgaggacgtgctctcccagcaccgcatgatggccggcatggccaagcgtgttggcggccagaagaagcagatgcaacaagctcagaacatgatgaagggcggaaacaagaaccagcagatggctgccatgcagaagcgcatggcgtcgatgggcggtgccggcggcggtggcatgcccggtatgcccgatatggccaagatgatgcagatgatgggaggtggcggtggcggcatgccggatatgcagagcctaatgagccaaatgggcgggttgatgggtggaatgggaggaggtggtggtggacgtggaagaggacgttaagcccgggctttgctaatcttcttgtttcatccctgcgtttttctttctcctttccatatcccaccgctggctcatcaacttagcatttgggctggtgtttggcgttttcttgctacttcgcattatatgcaacccttgtatacgagaacaaatttggtaatgagcctatcactatcacatataccatcctgaaaaaggaatcatgtccccttcttgttctaccacaattacacttttgaaacggaagtttgcagtgcggtactatcgttgtattcataataaaatcacgttgtacacataatcctgaaacagaaacgccgctaaaatccatccgtctaataagattagagaattgatacgaaaacaaagggaccgccagatcaaccatggccatgttcatggcggccaggagatcatgcaccaggcgagcccagtgagatcgaatgagaatcaacatgttatgcttttgtgttgggggatagcaaataaatcgagtcatataaatatagatgaagcccagatcgcttccccatgagaggtaggtcgagaaagacaggaaggatatgaaacaagtccgtatggtacatggagcgcccgggagaggatggggggtatgggtatcaaaagtgtccttgtagggaggaccggaaaaaaacacaaaggaaacccggacgcatgaaatccataacaaggattgcttatttttcggcgaagcgacggtcgaagtatcggagcacacccatgacgcttgcagcctcaacttccagggcagcgcggctgccagggggagcgatttcgcggggatcggggagggtgtggagcttcggcagccaggttgagatttcgtcggtggcgcgggagaagttcgggtgacgggagagggtggtaaaggcgtcagcacagctgagtgttagctctgatggcggagcgggcttgggtgcaggaggttgcgaaggcatgggggcgttgttacgcggcttgggcgcggtggcgggggcatttctcgacatgcagcatccaccgtcctttcctccgcctccgcagcagcctcctcccgatggagtgccgctcgctgaccgggaggctgccaacgtcttgcaaaaaagagtgcttcgggggtcggactggcactgggcgcaggtgcctggaccgttggcacaggaattagtcgcttggctgataggtgggagggtcacttctgagcggacgtctccctcggatggtggcggggtgaattgggagatggattgaatcggtgcgagacgattggtctcaaatgtattgatgttgcgtacacgttgctgctcctgtgcggccatttcggcgcagatgcagggagtgccgtcttggcagaacccgcagggatcaacgggaggcgaagaaacatcgttgtcgtgagactgggttggaacgctagaaaactgagcggtaaagtcgatttccatctcttccggatcgggcttgatgtggggatccctatgatctcgttccgggctgccaacgccatgaggtgagtgtctagaacgagacgactcatgggtatcaatttgcatgccaaatgcatcttcaatgcactggcagtgggcgttggagcagttgttgcaccccggaggtatactcatctggctatcttccttgttgcgttcggtacttgtaggctgaacatcctccattcgggagcttttggtcttacgaggtggcaagggaacagagtccggaacgggcgcaggcttgctgacactagggccagcgaaagatgaccggaactccttgacaagggtttcctttgcgctgcgctcgatcgatacttccttctctaaggcgtgacaccggtcgcgccaccatcccatctcttcacggcattgatcaatctcaccagagaggtttccaatttgctgttggagcgaggcgacttggatctcgtggctatcttcaatttctttcatttgctcttccagttcactaacacgggcggcccggcgctcacggaacgctcgttgagctgctcggttctgagctttgcgtttggttggcggtgtatctgtagctggcttgcgaccaggcttgggacgtggtgggattacccattctcgcgaggtgatggagccgggggtacccgggcctggagatggggctacagagggcctggcggctagcgtgggcgccggtgcgagggccagtgcagaaaccccagctggagcaggtgccatagacacactggccatcttgacaccaaattgagcttcaaatactgtttggaggtcagttgtgggcaactaatcgggcgtagtcggggcacacgcacgagccgtttctcggtcggaagagcggaagtgcgctcataagagccgataagcgaaaatgactagttggagagaaagaacgaggttcctttcaaactctgttctgtatgagataatcagactggggatggacgcatggacactcaaagagtatagaaaggttaaagagaagagagagatgcgaagggagggggaggaagccgagaaaaagcggccgatgatcagattagattatgtgctcacatgatgccggtttcggacattgagctttcggttgttatagaagttccgttcttccaaggttggctcttctttttctttttctgctgatttaccattggtctatttactatttcgctaaacctaatcctgtaaggagctcctcttttgaaatttttatctgatccgaatctgagtggagatggttccgagcaagcgttggtgggctgacgcaacatattctactgtatggagtaatataatctcttattttcttcgctaactgcgtgtaattgtttcatagacgcagctcgagcaccaattgcttgaactagaaccagcaaaggacagttgcaatggcaaaatcccgtcccaacttccaactctgcacttcataacgtactgacttcctatgcagctcaccgttctcccgcctgatcttcgatgactcaatgacaggcgacacggatcaaaattctccagtcaaagtaaaatttgttcgagtggagcgtctcgtcaatccattgaccatgggtgggcgagacgccccctacttccggttctaccagccctgtagccacttagcactacctagtagcaacggccatcgggccaatgagaacgtgccaatgcacaagggaactttcccacgagtcatccatcagcggtgagagtatggaagagtatggatcgacatgggaattggaacccgttcagccgccgttctcggtctctctgatcttatctgattgcactaacgccgctctagggtcaaccgcaatccaagggttggagtgaatatcggcaaacttatccctctttcactgccgtatctttttccctctctggatgattggttcggccttctgtggaagtggttggtggtcttggcccttgcaaatgcccccccacatagcagaatcttatcaatcagtgaacgatgctcgccaacctcattccgagcgagggccgaacagcggaactttcgtgtacatcgcccgatctggagaataccgccgccagttagtcacagctagagctgcttgtgacgtgcgtatgcagagattgacggtgggaaaagtggaatgtgtggaaagaaatcgccgccattggacacgcccagtctcggcggaaaattcaatccactattctcagttatatctttccagtgtacataaaccgacttaatgacgcagtctagtgatattctagcaaacaccagggacttccaatttgctcttgatctgctgagatgaattccaataaggattctagctaaagctaatcaatgccgggcttgttgttcgtcttcggggctctcaatctgcaagggacatgagctctacgttgatatctagaatatgtttcggttatctagtatttgattcataaaataccaatactttctggggagtcaaagaagtgagaacagaaatcacctttcctttgacgagatcaggttgaccatttgccactgaacgtttctgaggggcgggtctagtatagttatatacgtctgagcggaaattaacacagggctcattccaaattgagagctattctctccaagacattcatcaacatcgatgtaacaagcattcacaactgcgttaatcgaggagttccctctgctggaggagcagagtactgggtctccacaaagaccttctgcatgcctatctcccgcttattgaaactcgcatacaatttttccatgtcttccaaatggacacggtgggtcaccatatctagcggattgatctggtttgtctcgatgagatgcatgaggtgcttccaatacttttgaacaggagcttgtccattacccataaggtgaacacctgtctgcatcagagccccaatgttaaagtgattggtctgggagtgattgttagatacttcactcttccgaaaaccggtgaactcacaaatgcgctatagacacctgtcaccccaacatgaccgaacgggcgaacggcagtgatcatttcattcaacatctccgaagtgtccgtctccaacccaagcctctgctcaaagtaatgcgcccatcctttggcatattcacccgatgcacactctaaagcaacatcgggtccgccctcgaccatctttttcagctgtgatgtcaccgactcacctttcggtaggtcactgaagatgatcgtctcgatcctcggttctttagtcttcacgaagtccaatcgccatgcaccgtcacctccatcgataaggatgactcgactagctccatggaagaagctatactgtgcgcacatctgcccaatcggtccggctccccagatcgcaacaacatctcctttcttcacacccgtgtcgaccacacagttccatgatgttgccataacatctgagacataaagtgccttctcatctggtacatctgctggaatttgaagcaaattgacgtcgccgtacggaactcgaacatactcggcctggccacctgcaaacccacctgtgaaatgggaatagccaaacatgcctttttccaatttagtatcaatatctggaccctcagggccgggtgaaaggtcagatgcacatcggccactctgctcaacttacctgcagttcgcttcccatacaaggcattggccagagcattctcgttggttcgttcacatacagaataatactctttccgacaattcctgcaagtcccacaggcaatcggaaaagcaacaacaactctttctccgactttgacgttctttgcctctggccctacactttccacaattccacagcattcatggccgagcacgtcgcccttctgcatctcgggaatgacccctttgtccggcacatttgtgtcagtctacccggtcgctcggatgatcgtgagattattttcataccgtgatacaggtgcagatcgctaccgcaaatagtggtgcctgtgatcctgacaataacgtctccagggtcgatcacacgcggcttcggcattttcactaatcagtggtcagcaatgtacaaaagcctaacgccggcaatcgcctccctcgcttaccaactttgacttggttcttcccttgccaagtagtagcctggatcatctctcctgtctccattccatgttcattggcgtagttagacacgtcagtggtgattgtcgcattattaccacgtgggagtttcttttccagtaggtttgctgcctgggacatcgccattttcaatatattcgatgatacgtgtggttgggatatagcgagtttatgctttcactgtccatggggttcaataggaacttccggcttggttttaactactagattgcagtatatgtaaaaatgacgaaacttcctggtttgggggtttctgtcaactgacatcaccatgatgcggcatgccaggtgcagagtccatacatatgttatctatacgtacgggattttccctggcgtgtggggctttccgcttttatgagggtcagtaagaccaagctcttgggaaacatctccgcgtacgtacatagcagggcattgcttattctctgatccgaactatgtattggcaaggtcttactagcttctacttctactttacatagtcatttacgaaataaggcctctctatgtaatgtgataagtcattgggcaacatatgcagtctcagaatgataccaatgctcctaggatatattgccgcttaatggtagtgttgattttctcggacgcaaaatctcttcattggctacggacaacgaggagttgctgcagccaaaggcacataaccttgagggctccaattatcccgttgcttaccagcgtctgcgttttggttgaggtgcggcatctctttgttacgacccagagcggaccatgctaacccagatcaggaacccgtcaaagagaggattctgagcaagaatatacaaactactctgggctcgttccctcgtaagctgcattcagaggggacagacaaaacataatggctttttgcggccggccaaagtattgctgcgccgcaacaaatacaacctttccattggtcagcgtcagttgcaaaggcgatgttcaatattctcgtcggaaccaatcttccaaagtatctctgatcttcaaagactatgctgtcccaacaaatcagatgaaatgggctttcaatttgtcagagatacttaataatctacaactactcggctcaggcgggcgctttgctggaccgaaaatctcaaaagaagaagagtcgggatacgtgtgtagtgacagtttcagttctatatatatggacggcaatatcatgcggctactcgacaggtattttccccgttcactcaccaccgccgtgtcttatcctatagtctggatctatacagaaaatagcatcgatcacaacagggtgacaacaaggttctttcatcatcgcagacagctgccagaccgaataggccaagatcaatgtcggaggctccgtgaattgccgtaataactactcgggtcgcagtaattgtcaaataaaggtagggagtcctggccatggttattgtgcataacccgaagagtctctgcgatttgtccatccaactctcgttttcggaagatcgtgggttttcttttcgataagcggaggacatagaccggtactggtatcttgcattcatgggcggtttggtagtcataatcggtgttgtttagatcgaccacaaaagaggagtgcttgccggggtagattgtgaccgcagggaaacgagtcgtattattcctattgtattgatggaggccgtcctgcgcctcgctggcaaatggacgtatagattctaaataattgttcggatcaagaatactattaggagtatcacccagtattcgcatcgttcctggaacaacgtctgggggcaagtcgaacaagatctctcaaatttggcccatcgcgtggctgcgaatatgttgagttgagtcgtccatagcaaggaagaggattgatggtatgtgacaataagtggatgttgctggcctccctgtgcatatgtgaaaagatgaagtctccattgaatgtgaaggtgaagtctatcattgcttgttgagcgaaaggattaatgttcttccgtctttcccctagcaggagcatgaaggttggtcgtctcagcgactgcgagcccctacaacatgcataaggagtcagacttactagaactaatctggtagcaaatggcgtcataggacttgatttcagtgtatgcgatttgtaggaactaagcatttagctaactacggtgtagattgttgcgacgatattaacaagtatcctctcacctgcatataagtactatttgacctgtaagaaaagaacatgtagttgttgtggacagctgaatccgttatcaccggactcggcgataacccccgggggccccgtgaacggatcaggtaccagcccccgtcgggactccgccttttcccctcacgagtcattctctcctccaactcttcctcttccctacactcatacaatctactacatttacaacatgaccaggaagtacagctcgacccaaggcctcgatatgccatgggcttcacaaatgtccgcccagctgcccagtccggtcatttctgtacctgcagcacagccagtccgagctcaggaaccgatcgccgatgaacctgtccgacccgaggattactccaagccctactgcgagttcatgacatccaatcccacgatatttcacgccgttaaatccttctccaatcagctcgaagagcatggctacaagcacctctccgaacgagcggtgtggacatcggagctgaaacgaggcggcaagttctacacttcccgcaacggcagctctttgatcgctttcaacattggctccaaatatgagagcggtaacggcgtggctatcgttgctggccacgtcgatgctttgactgccaaactgaagcccgtgtccaagctaccgaacaaagcaggcttccagcagctcggcgttgccccgtacgccggtggcctcggtaatacttggtgggatcgtgatcttggtattggtggtcgcgtgctcgttcgcgatccgaagactggcaaggtggagaataagctggtcaaacttgactggcctattgcccgtgtgcctaccctcgctccccatttcggaacacctgcgaatggcccgttcaaccaggaaacccaaatggtgcctgtcatcggaattgataactctgatttgtttgaagactcgaagattgagtccagcgacatcaagttcgggacgtttacctcgacccagcctgagaagcttgtgaagatcatctccaaggagcttggcatcacagactacagcactattgtcaactgggaattggaattgtttgatactcagcccgcccaactaggaggtctggagaaggacatgatcttcgccggtcgcattgacgacaagctctgctgctatgctgcacaggaagccctcattgcttcctccgacagcacatcgaccggaaccgtgaagatggttggtatgttcgacgatgaagagattggcagtctgctccgacagggtgctcggtcgaactttatgagcagcgtcattgaacggattaccgaggccttcgcgaaggacaactacggccccaacctcctttctcagacagtggccaacagcttcttggtgtcatcagatgtcattcacgcagtgaacccgaacttcctcaatgtctacctggaaaaccacgcgccccgccttaacgttggcgtgacagtgtctgccgactctaacggacacatgactaccgacagcgttagtgagggcctcattagacgagttgccgagcgctgtgggtcaaccctgcaggtcttccagattcgcaatgactctcgcagcggtggcactattgggcccatgaccagtgcccagatcggcatgagggcgattgactgcggtattccgcagctgagcatgcacagtatccgggcgactactggcagcttggaccccggtctgggtgtcaaattgttcaagggattcttcgactactacgaagaagtcgataaggagttcgccgacttttaaattggtaattccgtgctttgctttagacagttagagccttttctcctttgtgcatccctattccaggcgtatcgtcacgttattctatgctttgggtgtgtgtattagactacaagaagtggcttcattctgtgactatatgtattgcttttccaactcttagcaataagttatctttttgattcgattgctgtacctcaacgaactatatatccaaagaatttccaaacatacatttcacattactatatttttaaaatgacataagaaaaaaaatgagtgtcccacgggtgtatccccatggggtaaatcatggcccgacaactgccaggctcaaagagcgtggtgcaacgttgacgaggaccaaaaaacaaatctgacgggtatatcacatcatactccaagccaccaatgtgactgcatgagccattcaaaaaccaaatacgtgtctataaatcagaccttcaaaacggcaccgccaaatccgcaggcaaaggacgaggatgcgtcagcgtattgggccgactcagaggccgaggagccgagataatccctgtcaatttcttatcttcctctctcgtccagcgcttaatgctagatctgaagctggtcctaggaacaagagcgagaacgcgctccgggtcaccggcgccatactcgtgttcttcgccgggtgcgccgagggttgatgcatcacagttccagtcggagttgcgccgggttgtatcgccgcgggcggggcggctggcattgaaggtcgatatcatgcctgggaatatacgggcgacgaggggttttagggttggtaagcaggcgcatattatgcctgtgttgcattctatggcggaccaggaggcggcgccgacgttgtcgtctagtttgtggggttagcttggtttttgggatgatagggctgagcggtacgatacgtacaggtgggatcggatgattcggcgatttgtttcaggctgactagacggatgatactggtgacgcagacactagtggatgttatgttagtcgtgggaaaagatgatgtttggaacagggtaactcacaagccacccagggcgaacatgatcattaaagcgaccttttgttttcgaggtaagtcgactgccattagagccgggatgggaatgatcaggatagcaacatcggttgagatatgcatactagcattggagaaccacaggttggtcttgttcaaacagaaaccttgtattgaatcgtcccagaatttggccacgggaatgcagttgaggaatgcactgatcaccgcccatgtgccatagacggcgaggatggtgatcatgatccaacatacgacgcgcatgcggtgcgttgggaagactcgaaagtactgcatcagaattgaggctttggcgcagaggacggcggcgttgtagaaaggaatggtgagccagaaggcctattcggattgtttgttagatgcagttgacagctaatgacccggcttagggcaagctcaccttcatctgtctctcgaaaatgtttggtgggatatctttgaaatgcactcccatgccactgacggcttcgataatgtcgaggcccatgaagacatatgaattcacctatacatctgcatcagtatctggagtcctttgatatcagtaccaatcaaccaacccaccagtgcgataataaccatccagtcatttgcttccactcggttcataagtttcatacgagtatacatcctcatcatcacgaagcaggttgccaagaccgtgaacacaacgcttataatcaagccctgctcgcctcgggaggacataagtatgccgtcatcatctcgcctgaagatcgcatctcgaatgtacaatagattcattgtcacgcgatcctgtggcttcaggaaaacaaaggaatggctactcctcaaagagaagattgcccggaggacagcctaacgatccgatcaataagacgatcctgatctgattaacgattaagatagggcacaaaggagcggtaagagaacaacctctccaccaagaggtgaaaaatcaaagaggatatcgctctattataatccaaagcgcataaagctgatgcgcagcgtcgccataaacaaccttatgcagccccagaaaccaaacggcctaggaaagaatccactatccctttttgagagagacacttaaaggacagccattgtatctctcctcgctcctcggatgtacgggcaagtgcttctgacgcaagacagcatccccgtctgggaagcgtgtttgcagcagcatgcagcgcaaggggcgcatacaacgaatcgggtccagcgttggccccgatggactcgatatgtacatctgtactctgtattaattacaacactatgatatttctttgctgtatttccaatttctcttctttcccttttcttccctccttgaacctggtggctgcagtttacacgggaacaaattatagtttgcagggtcttttgatatatcaatttcccacaccttattttgagaccacagaaacatttaccccttccgtctcactggctctgaatggcaataatttcaatttactcctgtcgatcgtccatagacaatcccctctaccaatcagatcgagactacactacgtataggctattcttgctttctaatttgacgcgcgacagactatacttccacggattatcattcggttccaagttgctgggatgctatgttatgtgctacgtacatatataatagttgaagcaattccaaatcactttgaatatgacatgatgcaatatttgcatccggtgtttgcttgcagataggtcggaggtcatctcatttgagattcgatcatctccgaaggtgacactgaagaagcatgtataacaactgacgataacgagcggggcctgagactgcgctgtcccggagccagctagccctaactgcccatggaatctctcactgcagttggcctacatgtggaaagctgctcggcctcagggaccaatgtaagcttaaatttgtcagacctattggttactggctcctaaatcgtggtcatgtgcgccactttaggttaaaagccagcccccagtcccgacacggtggaaactgccaggcaatcacgaagatgatcagtaaaagccagggactcaaagaaatcagcacaaccttcgtatgaataccctatacagaagttgatcaacttttgtcgacttatacccctctcgttctgcagcactatctcgttaccttggagattggaggaatggttagaagaaggtttcgtctgtcttaatagttgaccgagaaacgaacaacccaatgtagacactgtcttattttgcatgttagggcaatattaagctcatcttgatgtgtaaggggcgctccatttattgccactaaactactccgtatgtaacagatctacccgcagctagaatagcagagtgttcaattaaatattgaatcgaaatgcgggggagagagagtaaatctcctatttgttggaacatccagccacctcattcgataatagcggaggtcttgtaagggatgaccatctacgattgacgcggatatccgctcccgaaaagcttcgtttgctactaatatcaggatctgttcagttcatgcgacctactaattggatattgttaatgtttctcatacgaagaccgtcggtctcaggatgatcttgtggccttgactagtcgcgtcccacaacatccaaagctgctaaccacgcaatccaactcgtggcaatgtgtcgagttttgggaaggattcaagaaaaagcaattaatacgttacgcaatttggacttttcgccaacggcatgtggccaaacaagacccctgccaaggtggtgttgggtagttgacgtgtcacatacgatcattagggctagatattcgtctgggcacagacatcggtacagtaacttccctctgtcaaagcatggaagaacatggctttgcatttctactgccaaaatttgaatcctgtagtggaacgctcatatacgcaatacatcttgttaatatgtagggcgttaggttcttgacttgcgttgcatgcaggttgccttgcttgccgagttgtcatggcagcttgggacttgaatcttgcattaatataaaataaaatatagtttctagtctaatttgaggacttgtaattgatgcgtagaacattgtcgatctgctaaccaggagctaactggagctataaaacggttgcaaagtactttgtcgcaattttgagcaattcgatacgccaagacggctctatacctatctctcgattaacaatgtcatgggatagggtgcatctccttaccacctcttcatctctggtcattcatcttactgcagctagtcggattcaaattaggatctgggcagcttaattggactagattccgcgtgtgttgaccactgtctctcgtggttctgagtctacagcctcttatacgggatagtattgcacatttcttgtgctcaaatagcttggtaggaatctgtcaaattgacacctaggcaacttcttgcataccatagaccgaaaatcttcttcagttactgtgggctgtgcaagctacttggcaagatgtcagctccctgttctaaatcaagccactgctggttaaaatgagaagtaatcgtatttccttacagtctgcagcaactctctttgccgttgtctgatttttgatttctctttttccacaaggaccttccggattttggttgagtctgcaggttgaaacatgcaacgtccctattatagggaatattaaatctccacagagagacgtatataatttgaagtaataatcttggaacttagattgattagaagctgtttgcatagaaccatcggacatggtttctttgttgtaactttgatttaactaccctgctgcaagagaagaacgaattggcttggccttcaaagctattttgtgcttactttttggagatactatactatttacacagcctggggaggaatcggcaaccaattggcctggtttccaacatgtgctggtctcaagctggcggtaactgggcattccccgattgaagaaaggaagaaatcctgcttctgctaagacatagaaggatctgtttctagatcttaacctccgttatgccacgagatctcgtcattgaatcaaaattgtgttggcgtatctcaagtctcgtggaaaatcgcttggcaacatcagaattttggtctccgttttaactggcctgccttcaactgaagatggaatgtttgatactatgatctgagtcccaaataactagagaatgaatgtattgtccaattgcttgttacagacgaaagtgccgtagatttggataggcgataagatagaccgataaggacgcacaggccaccgttcacagagaaatttcatttccacaactcggccaattctttcaagtcgccaacgatatcctcttttctcattgtcgatcggtggaaatagtcctcatacacaggacaaaatggcaggcactactgccgaatccaccaaggccgtccatacaatcgtgctggacgctggcccaattctcaagaataccccgccgctttcaaccctccttgcccagtgcgacgagattatcaccaccccctccgtggtggctgagatccgcgatccagatgcccgcgcacgtgtcgagaccctatacctgcctttcttgaagcagcgatcccccacacccaagagcttcaatatcatcagcgaatttgctcgcaagaccggtgaccgttctgttctcagtagaacagatattgaggtcctcgcccttgcgtacgaaattgagtgcgaaaagaatgaaggagattggcggttaagaagcgttcctggccagaagagaatcaatggaaagccacctgtcaaggaggaatccgaggaggctaagcccgaggatgcggaggtagaagccatcacagatggagtcaaggagactacagtcgcagacatccaggaagagattccaaaggaggaagaaaccgctgcagcgaacgaggctgatgaagtcgccgagattgcggccgtgatcgtcgaagaagaagacgaggacgaagatcaggatgcagaggatgatgctgacgacggagaatggatcacaccctctaactataaaaagcgtcttgctgaggatgagtcgggaacatcgactcttaccgctgcgcccaagacaatgcaggttgcgactatgactactgatttcgccgtaagtacatcccacacaacatctgtctattgcccaattgcttattctgtatagtgtcaaaacgttctcctgcaaatgaacctcaaccttctatctaccaccaccctccagaagatccagcatctcagaaccttcatcaagcgttgccacgcttgcttcctgaccacaaaggagatgaacaagcagttctgtcctcgctgtggcaaggatactctcactcgtgtctcatgcaccaccactgccaacggcgcattcacaatgcacctgaagaagaacatgcagtggaacaagcgcggcaatgtatacagcgttcccaagccaattgcaggcagctcgaacggcaagtggaagggcggcggtggccagcgaggatggggcaccgagctcgtccttgccgaagatcagaaggagtatgtccgcgccaaccaggaagaagagcggcggcagcgtcgcgagcgtgatctcatggaccaagactacctgcccggtatcttgaccggtgagcgcaacagggctggtggccgtaccaaggtcggtgctggccgcaatgtcaactcgaagaagcgctaaatgtgctgcgtgtatgattttgcatcttgattatatgggctggagttttggggcatggaaagaaaaagttcacttggtcaataccgctgtcatagtggttgtcggcctttttatgaggaatgaccatgtcttgtgatttacggttgaacatagaatatatagccaatccatagggctctttatgaacattttaacaaaatctttgttgattacctagatcaggtataatattctctagaatgtctagatgaagcctcggataggttatccaaggacagcaaaacaagtatggacatctcagccatccgttgaccacaagaaaaacaccattcgccaaaacatgggctataccacccggtaattcattttccccagtatcgatcaatttaagccttgacaggagtgtctggacaatagcatattagtttgcagttctgcgaaggcgtaattcttgaagaagacgtaccgggctgctgggtgaggagaaggttgtaacgcttcttcagggtgacacggtgactgagaaagaggttagtttccatgcttcaattgtgcaccatgcagaacaaatagctacttaccgagagtacttgtcatcgggggagaagcgagcggggtgggcagacttggtgacctcgccgttcatgacctatgattgccaaaaattagaatcattggccaaagttaaacagtggccgaggagccaaatgtgcgcgcggcagtctcctcggcgcaaagatttccgtaccttcttcaaggtgtaaacacgcttgccagcgggatcgagggtgtactgttcgtcacaaaattagtggccgatctccgaacggagctgaagattcgctcgcttcgatcgcttcgaagtcgcaatgagacataccataagatgcattctgaagagagcgatattagtacatgagaaatgaagaccacttggaacacgaatcgtcaacttacttgacggtattgatgaattgtcctgtgttagtacttgcgtcggcgataagtggaggaatttttttctcgacgatgaagagctcggaccaccctgcttagtcacggggtgctttttaaacggagctttcgaccgcaaaatttcctttttctctcgcacttgagcagaaaagagaataatctctctagaattacccttgagctctgttaatgtacagagccatggttattctttactaattggcacttgattcaggttgttcatacatacagagacttctaggtaagatgatcctcagctcttctacactctccagcacatccttcaccttcggtgatgacaccatttatttagcccaggcaggcggcacttttgatttctagttgcctgtcgatgatccgctgaattgactacaacggtatctgagaagatattaccatgacgattgattcactcgcatgtttcggcacagttcgctaacctcgaattttgtgtttagtgctttgaatattatcttccagtagcggtttccaggatggccactccagtaaccagcgtggacaagcctgtggctatcgagtcagggcctgcatcagatgcacgtccgcctcgtgcacctcgacctcctaggccaaacttcagacagattcaccagtttcctcttccggtcaatgtacatcatgttcctcctgtaattcctcataaccctctttctcttataagtgttgttctctcgtacctcacattccttatctccccgcctcgtcaagaagtctactcggcctacttcgacaaagccacctcctctatccatgtcacggatgagaggtccattaatgccttatggcagatgggatttttcggcaagggtagtctcagtcgaagtgaacccagctggctggcgcgagagaaaaaacgaagagggttacataatgggaagaccagcgaggaaatgacaagactgcgacgaacagaacgtcgtgaactgaagctagagcgtgcccggatggagaagctggccattgaagaaagactgaaggcggaggcggctgctagggaatctgctccttctgagcctcttgaccaaggtctccaatcaacacccaccgacgatacgactaatggcacagcggctacaacggagaagttctccttgaagaaggcaaaagaagcacgcgcgctggaggcacggcaggcgcgggaattggctgcgcaaaatgagactcttgctgaacaaaaccaacgcgagacttcgtctaacagcaaatccgtgcgcttctcacccatcgtacaaaagaaagaattcctatccaactcgccctcgtcactacagttgcctgactccgtcgtcgacagcctcgatttagatgactttgcaaatgaggagcatcttcaactctccaatgaagaggcgttcttccttgtctactcgcttggagcattgcaaatctacgattcacccttgaaatccggggaagcccaaccaacctcgccaaccaccacccctgccctcctccgacagttctgccaccactccttccaacccgctcgtgacggctccgcatccctccaacctgatgatcccttcctgatctcctacgccgtctaccaccacttccggtccctcgggtgggttatccgctccggtgtcaaattcggaaccgattacctgctctacaaccgcggaccggtcttctcccacgccgagttcgcagtcatcgtcattccttcctacaatcacccatactggtccgaaacggaagaacggaagaactacacagcagagaagcaggcgaggagttggtggtggatgcactgcgtcagccgtgtacaggcccaggtgttgaagagcttggtcgtctgctatgtcgaagttcctccgccagctgcttcggttgatgatattggggcgctgtttggtcaatacaaggtgcgcgagttcctcgtcaagagatggattccgaaccgcactcgtgattgattgtcttagtttcttcttgggtttgtcccgtcaaggctggggatgtttagggcttcagataccctctctgtaaatatgctgtattgtccatgacttcacaaatgtattatgattgcataatgacccatgaaattatgtctcatcctagattatttccaagacaattagtaaattatttagttcaaataatcagagcacagtgccattgagagtgagtgtctatggtactctctcatggcgctagtctataaatggtaatattacttcaagacacgtgatacgcgtttcgcgttctgacgcctccatttgcatttgcatttatgtaacgcattcgaagtgtcaagctgcgttaaaacaaaatatacggatacagcttcccgtatcaagacatactagacttccctgaccgtatgtcgtcaaaatggaaacccaggacgatagcatcgaccttgcaaagttgcaacgcgacgcgttggggctagtatgtaacgaccctgcagcgtccctctcattggactaactccgacatccccaggagcacgatccgtacctttccagatctacacaaaaaggtaacgagccgaatcacactctttgttacacatcccacaaagtcaacggtgcttccaatggtgacggagtgtgcaacggccaacagttacctccgaaaacaccatcaaacccagcgagccttgtgcaccaataccgaccctctttgtatcgacctcgtcagcatgaaccacgcacaatgatgttcaataaaagtggcaatgaaccgggcatcgtaccaggatcgcaattcggcaacatgagctccgctcctggggatacccaggtcatctctcagtcagtgtacgacaagattatcagacaaaatggggagtccatgcaacaagattatacacaaacgggagccgatggagcgacattgagaacactgtatgagggggacagtggccatatcgacctgctttccgaactggacaccgtgcaccacggaacgaacctctcccaagatgacgatgacaacgacgacgggagcaattccgatccgaacgagtcttctccaatggcttatgcacccgatttattccccgaatcgcaacgattcctagcagaaacacccggaacagtggtgaaaaaaaatgaggcgggtgggacagcagagaccccgagcatctcgcggaatcccctggctagtggcatcgagtcaagtggtgggcttcttgggctgagccaggttttcggagctacccaggccccgtcgtctcccattgtccacggcctgcagacggagcttgtatcggatcgcccgtcgcccaatatcccaattcaatccgctcgtgttgtcaatggtatctcgtcgcctttgatgggcttgccggttcagttcacgagagactcatccgaaccgaatatgaactatatatcgatgaaggaatcgcagaaaaggcgcgataagactttgggggagaggttgactcggtcggccgacaatatccagtcggaccagagtgacaaggaattctataaagagtcgagctttatagaacgtgcacgacgacagcgagagattgacgaggaagctgcggctcaattcgccgggttgagtgctcctgccagatctacatccaatctctccgccagactacggactccctccgagcagcccggtgaacaacaagaccaggaaatgatagaagctgttgccagcgaggaagaaaccgaacaagaggaagatatgcaagtgcccaggtcacaagagcctcctcaatcttcagccgaagaagataaagagaactacgaggggcctccaatggatactgctgctgccgccgccgccgctgccagtgcccacgatcgactatctcaggtacttgggtttgagccgattctctccccatctcgcatgcgagtagacgagcaaccggatgatggcatagctcatggaggctctggtagtcagccgaacggtgctacaagttcttcccaggccatggtgaaagactctcaaccatcacctcagtcatcggcaaagctcatagaacccgaaattactaggaaaattactcatcggtcgccttcgcgttcgcatatgaattctcctactcgagaccttccctcctctccctgctcgcgaccacaatcaagacattcgaacagccatactcagagaaatggctccgtatcaaatgaatatgccatccaacatgttcagactactgctcttaacgagaatataccaacatactctagcaacccctcggagcagcaacatctaaactcatcgcattccagggtggaagcgggaacttcgggcaactcatcatcgatgccatcccgtgtggctgagacacctatgaatcaacgtcttaagcatctcggtgacatggctcgattgacgagtatcccagaaacaagtcccagtcactcccagtgcaattccgtggctgggtccaatggtgatggactcaataatgaagacgacgatcttccacctatgttgttcaatgaagtccccagtattcgaaataatcatatccgcccagccggggcaagggcactctcttcgcctctcaaaaagctgttgtccagtccgggcggaggccaacgcagggctttgacagaaattgcgggagatctttccccgcaggtcggggctggaggatttgatatgggtattggaattttcactgctgaggatcgagaattcaaagccctgatcgatggatcgccgactcgaccgaagaaaaaacggcgtggcaacgatggctcgagttacattgcctccgaccctatcatacctttcacccctcgcacacagcccccaaaatccgttgcacctattcgagcaacacaagaacgaccggctcccattcctgaagttccagattcggatgatgtgcctttagtgcaactccccgaaaaagccgtacgaaggcaatcaaagcccccgcgacgagcccctgagaatgtttgggaaatcgagagatcgcctgagcagcccttccgccagagatcaagaattggcaagacttctacctcgatgtctacgcaagggaagtatgtctcagaaaagagatcagtacccccaccaaaggttgtcgttcatagtcgaccaccacctccatcgtcagagctcactgaggtttcatcaacaattgcctcggatgatataattgagtcagaggcgtacagtgtcgatgactcgccgactacgcctcgaccatctcacaccttatcggaaaacaccgtggtcgctccaagtcaggttctttctgtctggatgggtcagaaacgcgcatactatccagcgacatgctttgggacaccgctaggtgtatcacaggttaaatactctgtgaggtttgaggacagtcttcctattgaggtaccgaagggtgccgttaagagatttgagcttcgcgtcggagacgctgtcaagatcgagatggataatattccaaaggtcactcatgtcgttcggggattcgacgacaagcttactaaagaagagttggctaaagccgctgacgatggcctctatcctataaccgacatttacggtcataccactatcatagtcggtcccaagcaacgcaaaagtctgccaaatggagggatgggcaacggcgagaatgtgattaaagtacctatatctcgtgtctatcttgatactatcctgtggaatcaactgaaagatcgcgcgttcacatatcgcccggcgcctgttcaacaagagagcatggtccataccccatccgaaaggtcatccgcgcctgcttcacccagttgtcgcttgtcccgcagccttcaccaaggtagcggaatctttgctggtatggtgtttgccgtatcttacagggaggatgaagcatccaaaaatcgtgtgaccaggttaatcgtcgacaatggcggcactgtattacatgatggatttactgagttattcgagccttcaacaattgtttctgttgatactcccatcaaaggtggagccaaggatgcaggtatcaatagcaagggtctccgacttacagctcttgctgaggaagtcggctttgcttgtttaattgccgatacctattctcggcgagaaaaatacatgcaagcactggcattgaacctcccatgcctgtccgggcggtgggtagaggactgcatcgcccaaggtcgcgtccttgactgggatatctacctcctcccagccggcgactcaatgtacctcaatggagcgacaaaatctagagtcatggctcccaaccctccatccacagcccgcctcaccgaaaccatctccgcacgaaaaaagttgctcgcagggcaatcggtgctcgttgtcatgggccgtgggaaggtcgaggaaaagaggaaagcctacatcttcctgacttacgccctaggggcttcccgggttgagcgtgttcctgatctcggcacggccagcgcattaatagactcgcagtctgatgccggtctgtcgacggactgggactggatctatgttgacgatgcagatcaagctgctgcaaagtcgatgttgacacccaaaccgcagacgccgagaattcacttgttccatgggaagaagcgtaagaggtcgattgcatcgtccactcctacaccccctaatgagccaaaatgtaccgcgagggttgtcggtaatgagtttgtttgccaaagtttgattttaggtcgcttgtttgaggagtgattccttatcttagctattgataccatagtatatcgtatctagtctttaatggaactatttagactcacatttacctacaaataaatgtattcaaaatcaacaggacgaaactcatttggtatctctattctcgaaggaagccaatacaacgttatttgagtaatcagcgagtcataccaggagtggtctctgtggtgtcagatagccgctcagtagcagggataggctccgggatacctggctcacgagaggtatcgtgcatgtctccaactgccggctctttgcctttgagtgatcgttgactcggctctacagccaaatcatgctcggctgtagatataggctctggtgcatttgacgtaggtgcatcgtgggtgttggatatttcagggtctccagctgcttcctctgtagctagctcagtgcctggcttactttcagtagccggtgttgtctcctgatcttctcgctcaggggatacactttgggaatctccgacgggtggttccgctgttccaggtgtctgctctgcgcttgactcgacagctgctaactgattatccccagacgccaagataccctgtgattgcccgtcgggtggttgcatagaagcctggggattttgttcgcccgactgctcgatgccctccggggctggttccacaggtccttcgacacggaagaagtccccgttcaaaaccttgatgagggcttccgcttcaggtggtggtggaatcgatccgctcagcagctcctttgctcggatttcccgcccatacaactttttgtttgcatctgctcgctctccaagaacaccaccctcgactgtaagaccgccgtataatccacgggtcttagagtaggcgaacaccccagttgcgcccttcgtacccactactcccccagcctcggcactacgaccaataggcccgacggccatagatatattcccaccaagagtcaagtttcccgcctgcatgaatgtcttcactgctgcatcggtagtcagaacgaacacgaaatcggtcaattctgcgccaaattgaccaccggcgccgacgccgcccattgccatggctgacggggcggaccaactgccatctgggagacgggcgacaatcagtcccgagccaaagcgtattgagcccaggaatccaagtctgagcgctgtgaagacggcgattccctagcatagaatgagtcgggtctgtttgggtcgtttcacggtaggatatctcttaccttggctcctacgaatatcttacgtgggatttttccatcgatcttgagtttcgggttggtgaaggattcgagaatcgcagcggcctttttgcactcgcctgtggaacatggtcagcctagagtcagctatgtggggtagcagtagcacggaggatgatactagatagtgaggcaggcaacgggctgtgcaacgggttcttcatggcatgtatcttttctctcgctttgtgatgtgctttgcaacaagatgtctacgtctacgcaaatttaagtgatgttgttctcacaaggtcgtatatcaggggttggcgtttaacttaaattgcgcacggacgtttcacgaggttggtatacttcgcgattgtacggagttacaggagtggacatggagtttcacaggttcatcggatttctaagtaattctatgcataatttagaggttcacacctctatctggcaaaatgttagctatgttacactgaattgattcggaagaatgaaactgccaagtatcaagggcctcgtatgatgaaacatgtagcgagatatatctattatgttacctaacccatatccaatgacccagagacatagtcatagtggaatcacgaatcccaatgtttatgtgcggcttgatgaattacaaattatgtagtttgcttggtagatcatccagggagggtttatgcaagatatagtttcatatcacgcgtcgaaagtaggtagctgcggtgagaatataatattctcggaggaactatcgcactctctatgatctatctacacatgtaatgtaacattgaaattgaggcgaatcaggaataaagttcgtccagagcatccatggataaggctgacgggccgcggttatgcttaattttcgagccagctgcacttagggcttacctagggaaaggggtacccggccaacgggtttgggccgtgcatttggccggttaagccgggccgtaattacctcaatactattatgaaacccaaatacaatgtctcaaggctggaagatcttcggaaataagcctactctagtgcaacagttgcaatagtcctgctgagagttgtacatatcggctccatttcgctacaacatacacatcttgcctcaagtccccagcggttggaccattattcccgatgctgttccagaccactctagtacttctcgtacttcagacgactagcgtggcatctgtgtccttgaggcgaggagcgattcccctcaccgttaaaacattcgattatgtggtcgttggtggtggtaccgctggaagcgtgatggcgacgcgattagcacagaacgacttcgaagtcgccttgatcgaagctgggggacactacgagcttgagtccctggcggagtttcctgcagcggatgcgttgtcgatgggatcagatcccactttcagctcaccagaggattggggctttgtggcaagagatcaatcgggtgccaacgggcggtcgattcatttcgcccgaggaaaatgccttgggggatcgtaggtatctctttccaagtctagcatatcagatcaaaactaatttctttgcaggtcagcgttgaatttcatggtttaccaacggtaaagccccatgaaaactaaatgcttaggctggaataaccggacatgcagtccaacacgcgaatctatggacgtatgggcaactacagtcaacgacagcagttacgaattcgacgaagtactctcattctataagaagagtgttcagttctcgcccccaaataccgactatagggttcagaatgcttccgccgacttcgatgtcgatgcctacgactcggatggtggcccattgcaggtgtcgtatgctaactttgccgagcctttttcgtcatggatgagcctcggtatggaagctatcggcattgatcaggcaaaggactttgtccagggtaatataatgggagcccagtattgcgcatcaaccattgacccagccaacgagctccgaagcagctccgagcaatctttcctatccaagatcaggcccaaatcactgaccacctatacaaatactcttgccaagaaggtggtctttgatgaaaataatagagcaacaggagttcaagtgaaaggattgctgggtgatcttgtcgtcatttcggcatcggaggaggttatcatctctgccggtgcctttcagtccccccagctccttatggtgtctggcattggccccatcgctcatttagaagagcatggaatcgacgttatagccgatcgaccaggggttggtcagaacatgtgggatcaccccttctttgctccttcttaccgggtgcgagtgacaacattcactaaatttgctactgacctgatgtacgcggctggccaaattgccaaaatgttactcaacaaaaaaggagtcgtcacaaatccaatcgcagatttcctggcctgggagaagattcctcgattcttgagcgaggaattctccgaggaaacgaagagtaaactggccaattttccatccgactggcctgaagcagaggtgagagacattctatcagatatagagaaaggctgctaacacggagattcctagtacatgtctggtgcagggtatatgggcaacgtgtcaaacctcctggcaatacagccaaaagatggatatcagtacgcctcgatactcggtgttctgattacacccatgtcccgaggaaatgtcaccttgaagtccgcagacacctcagatctaccagtgattaatcccaattggctcgatgatgaggctgatcaggaagttgcaattgccatgttcaagcgaatacgccaggctttccagagtgaagctatgcagcccgtggtcattggcgaggagtacaaccccgggccccatgtccattctgatgatcaggtcctcgagtttatcaagaataatgtgatgaccctgtggcatccgagttgtacttgcaagatgggaacttccgacgatgatatggccgtggttgattcccaggctcgggtttatggagtggatggactgcgcgtagttgacgctagcatatttcctttccttcctcctggtcatcctcagtcgacggtttgtaggtttctctcagtactgctctgatttgttctccagtgctaaccgtgtcacagacatgcttgccgagaagatcgcagcggaaattattcgggattcctaagcgccctaaaacagtttcagaggttaacacaaatattatccgatgacttgcgacgtctcgttataaattgatatgtagataataaataagcctgttttttggtcttcctgggttgtgcttacccaaccctggaagcgatgccatgaaacatgggcttgaacatggcaattgtgcccgtatctctaaaagagaggaagaaataaggaattgggaaagttgatgggtaaatgctcttcctataatacagtaaacaccagatacaatcctcatatcgctacagaaacccataagttattggaacaagacatcatgcacacggaaaatgccctcatttcttggctgtcttcttcttgcccttcaaactcttcagctgagcagcccgttcggctctctgctgacgcttcctccacgccaaccaacggttaccacgatcatgggccatagctgtgatgccggccttctcagcggcccgaccaatttcccaattagcctcacggtacatgtaaccggggcggagctgggggccagactcggcttccacagccgcgacatccgtcacacggacaccgctctcatcaacagaagcaacgagatcagactgagccacaacgcgttccgttatcggcacaggtgccatattcagcttgcgtcggctgggtgcattgcgagggtgcggaagctgctcatccttgtcaaaaacgactccgatataccggcgcttcgagtgcttcagtgggtcgaggtagtagcgcacgtagccggactgtgttgcatagatcgtgtggtcccgtcccattccgcagttctcaccgggaaaccatagcgagccacgctgccggaaaatgatgcatcctgttaccacgtactcgccgcccgagcgcttcgctccgagacgcttaccggccggatcacgggagtgttgattggccgttccttgggaggcgtgtgaggcgtaacgcacttgtgtgaatgggaggagtgcgcgggagagggagggtgttggtgtggttttcgggaatgtggatgttgcggagagagtgcgcaggagggattgcgattgcgagagcgtcggtgtcgaccggattgtcggggtgaaggctcgctccagtgcccgcaggggcgttagcactcgcggcttgaacatggtgggtaattggattgtttggaggtgtagatcgtgaagctccaaaggggaagtttttcgttcggagatcaggcttggcgtcacgtgtgtacccgtaaactggcttcatctatacaccatgcgaactcgttctattttctatacgaatacccgttcattctgctattagtgtcgctgtgatttttgaactatgttgcagagctggcgccaagccatttgggctcttctccttcttgtctctgtcgctcaggcccaattcaacttcttcgaccagatgttcggaggcggcgagcagcaacagcgtcaacaacagcggtcgcagaacgctcccagtgacagtgatcggtaccagcagatgtggaatggaggtaagaatcaaatatctgattgtcgagaacatgccgtcgaaattgcacttgccctcgtgaccacataactgactctttccttacagcacaatgcgaccactacctctgccccggaactcttgcttgtgtccacttcccacaccactgcccatgccctcaccctggtgtcgaggagaaggtcgaacttggagaaggaagtgctatttgtgtgtcgaagggaggattcaaggcgggcgaagctgcgcggaaaattgaattggctcgcaagggtcttttgtgaaaaattcggtctattatctttatgttatcatgtgaatcatgtgcagctgccgatgggttgtgaggtcaagccatggagtttggtgccgctggacggattagtccgataggattgccatgaatctttttggatatgcccagacgtgctcaaaatcggaaagccgacgctgtatatggaaaagaatgcctatattctcatatataacctgataattctacctaacacatgtcaacgagtctactatgtatatgtagacaaggccacttgagatgcgatttctcacgtctggccgagcactcctcggtaatactcataagtagtagagcatggagtaatagattagccagaagactagctgaatatcttgaaaatgaaccgccgtgatctaaatgagggtagtatgaagtacaaccgttataaacgatgtgccgttgctatctccgattatctccgcagtgaccttccgtcatcggtgtttcagcctctcggcgatggagttactacttaccaactttcatcccatcaaccttttgcctcaatctttgtctgtaagataatctggtctttctcggttaatatgtggggttcaaggctccaactcctgcaaaaacagtggacaccagctcgaactcgagctttttcgagcttcagaagtcatggatctcggcgcggtcctcgcaatagcataagaagaccgaatctcatacagacttcgaggaaagcggagccctcacataagaatgagcctgctacttctgagtcccaaggtggcacaagtcccaattatgacccatcgcaaaacactctactttctcccgtttacgtgcctgaagatcccacaggtgtgcttaaagaaacccatccagcagtttcaatactggcgaactcaggaatagtcgtacaacgagaactagagatgatgaatgttctgatgtaagtgcgcaagtgctcatatgcgagaaacatgtgtactgactccttcagtggatttgaacaagcgaataaatatgtcatcatggatgcgcagggaaatcacattggatatatggcagaacaggacaagggattggtgaatacactggcacggcaatggttccgcacccatcgaagttttgtgacacatgtatttgaccgacaacaaaatgaagttcttcgagtaagttcatggaatggccgtcttatagcacttgactgatctagcagttcaatcgcccgttctcttggatcaactcctatatccatgtctataaccctcttgatcaaacgccaaatgcttactcggcgtccacctctcttcaaggcacagcacccggtgctctcattcaacctggcaacttatcgagtgcaaggatatccccacttgatctcggtcaaatgcgagttatcggcgaagcccagcagcagtgggcacctttacggcgaaagtacaatcttttcactcatcagcagtccccaaactcggaaacagacatgggaacccgtaatttctcgctatctgattctggcttatcacgagcacagcagatgcaactgatacgaacacccgaccaacagcagggtcaattcaaccaatttgcctacgttgatgagccctttctatcatgggatttctctctgaaatcagcggacgatcagttaattggatccgtcaatcgaaattttgcaggctttgctcgcgaaatctttacagacaccggtgtctacgcaatgcgaatggattccgcagctctcggcacagaaacatcccacgacaagaagactttgggcatgaccctcgaccaacgtgctgttatgttggctacagctgtaagcattgatttcgattacttcagccgccaccaacgcggccttggtatatttgacttcccgccatatgggttcaatatgggcggccaggcccccgctgaaggtgcagctgcagaaggcgccaccgccggtgaagcaggggccgttggtggagtcgctccagggactcttgagcgagccagaaccgctggcgatgtgccaaatggtatggtttcaggtgctaccaccgcgggtgcaatggctgggtatgaagcgatgcagagggccaacacaaccgacccaaatgccccagcatcggagccggtggacccggcgtcacaaggcttcgaggatcaacctcaagatccttggggtaaggatagtccttggggtgaggaggattcttggggggagaatgacttttggggtgatgatagttcttggggtgacggaggaggtgaatgatgggattgttttgaccggtgatgagggccagtttttgtactataatattcactattagatgcagtagttgttctttaactagacttttgccgttcacctggacattttcccgtcaccctaagaaataggttccccatggcattgccatgccttgtccaccgccccggaattattccatccccactttcattccacccaagtcccccccccgcagatacctcaccacctaagtatttcgaattgcagttttaattcaatcaattaaacagcagagatggcgtcctccgtcgcccagaagcgccttttccacgaatacaagaacctctccaccaacccaccagagggtatcactgcaggccccatctccgaggatgacatgttccattgggaagccctgatccagggccccgaggaaacccccttcgagggcggcgttttcgcagcggagctgaagttcccgcgagactaccccctgagcccgccgactatgaagttcattggaggtggcgtgtggcacccgaacggtacgtaaccgagacaacccaggcgcctggctacttgctcgctttctcaatacacaatggcaaacatcttactggaatttgaattacagtctatcctaacggaaccgtttgcatctccatccttcatccccccggcgatgacccaaaccactacgaacacgcatcggagcgctggtcgcccatccagagcgtggagaagatcctcatctccgttatgagcatgcttgccgagcccaatgacgagagcccggccaacgtcgaggctgctaagatgtggcgcgagcggagacctgagtacgagcagaaggtcagggacgaggtgaagaagggactgggtctgtgagccgggctaggttgcggatcaatgcctcggttttctcgttgctgcgcaggtggatatttgtcaacatggtctgcttgtgctgcgcgggagtcaagatttgatgactggcgttcaagggttcatctttccttatttgcatggcttggatatgcgatggcttttcggtctgtacagtgcattcttatcctcgcattatgatagcggatgaaatacatgcagttctttcgattcactgttctcttctcttgcaactacttgctaaatcttgcatttgctttgggtttctactactacatggcaggtactatggtatatcgtccctgtctttatcttatcacatctattccttcctagatatacagatcgtacagcatcttactcctgccgaaacatcctccgattaatccattcctccaaccccccttggcacccatacaagatctcaatctccgccttcagattcaaaatcagcatccgctgcaattcaacacgccactctggctccggtccatcgctcgcccagacaggactgttccgaagcatggccataatcttcttacggtctcgcgtcgtcagcgagagaagagcggtgtcacctagtacctccggaactgctatgatgtctgacactcgaagacccagccacttcagcctcggtatactaagccgagcattttggtgtagttgtgctgccgagccgtacttgtacgtcgacatgatggccatgccatgggggtcaccatcggtgagggcatagaaacggggcggatgcctgctcgggttggagacggagtcggacattgcacgcaggaacgttcgtgtcatgaaatcggggtatccttttccctgttcgagtacgttgagctcggttgctcgttttggcgacaggatatgctgaagcagagacgcagcttaccgtgaccattattccttctccggccaatgctctggtgtggtaacttattcgcgcgagtcggtggaagactgcctgtgaacagggtgtgaacagggactcagcgtactggtactgcatatgtggtctctccatgcctcatacctctttttcgatgaccagtacccagcgcactcttgaaatatcaatctcgtctccgtcttcgatgcgaggaatcaaactgtcctcggtgacagactgcgcatcgatcaaaatatgggagccacggatcaaacgaaaatctcccgtcaccagtccttttgctgccgcttcctagaaagtggtgcacgaggtcagcaggttgacttcgcagtgatattcccagaggatccagcaggactaaccacattcaatgccgttctgttcactccgatggtatacgccaggtcatcgacaatgcggtccacggtacactgcacgcggaagaattccgggtcgatgtagtatatgtctctggtgattgtatgggtgtgttcagcataccttccagaccggttcctagacattgtcagctcacctcttggagattagctggcccgttcgaatagcttggtccaatatagctaggattcgaaggatgacggctatcagaagacgcagactcggtcagtttatcatctaagaatgatacctaggttgtgttcggatcatggtaggaaagagcttactgaatttccaggcctcatgtgccgtctttcctggccaagagtatttcctgtatgtttcaactctaggactcgcttccaatgccccgttgatggggttgatgatgcaggcaattgggctggctctgcgcttgagggtgatggagatgcttgcctctgccggggactgtgagagtccgtggatgagggctgcgagggtcttgtcgatgaattcttgggctgagggatctcgaccatcgtctattttcaaagtgtgaatgattgatggctcaaccattgccattggagtgggttgggcaaggtgaggatgttctgggtttgaaggataaatgtatctacccgtgcaccgcctgagcataatgcttacatgacactttccatagcatatccagatgaatctgtcatttgaacggtgagttttatataaatagggattcggttcattgctagtaaaaagaagcctttaacttgctatgacttgatcaatagaggtcagaagggttactgtatgtcgaagatttccatctccttcttctcgtcgaatctagaatttatgaatctagaatttattgccttgagcatctgtacgctgaatagtttcttttggtctgcatatcttttctttgaggtctgaggttcttgaagttagttgtatagacctcgggatgccaggccacaccaccactaccactaccgcaccaccataggcccctatcttttgatcagaacatccttgataccttcatcctcctcttcattcttcttctttcaatcaattgttttcctggcctcatatgatgtaaaacattcttcattctacaccgcagtcgtgatactgatgactaagcttccccggtttcccccgtgccttagctcctgagctggttatcgtctttactaggttggcgaaaagatccaattcctcatatcatgtcttctactcctcatattgggccgtggagaacaccagctgatggtcatctcaccccagatgccaatggagatcttaagaccgattactcgcgctggcgattgctcgatgaggaaggccgtcagacatggcggtatctcgaatccgatgtggaaaaccaagaatggccgcagtcagtagctgataaatatcatctgggattgccaacagtatttaaccctcattgacaaaaatctaaatcctccaatttaacggcgcattatagggtcttccagagctgccacaggccaagacgccattggaagctgccgagaatgggctttcattcttctcgcatctgcaactggagcccggaaactgggcttgcgagtacggtggccctatgttcttgctgccaggtattttgattacttactatgtgaccaatacccctattccccctgagtatgcaacggagatcaagcgatacctgtttgcccgtcagcacccagaggatggtggatggggtctgcacatcgaaggccacagctctgtattcggtacttgtatgaactatgtggcactgcgcttgatcggtgtcagcgaagaggacccgcgcatgatcaaagcccggggccttttgcataaatttggaggtgcgatctacggtcctcattgggctaagttctggctcagcattctgggagtgatggagtgggagggtgtcaacccagttccccctgagatttggttggttcacgcattgcaacctgtacaacctctcttttattaaccgactacataggcttcttcccgactgggttccctttgctccttggcggtggtggattcatatgcgccaggtgttcctcccaatgtcttggctgtggtctaaacaatggtctcaccctccagatgacttgacaagacaactgcgcgaagagttatacacccagccatacagctctgtcgattttgctgcgcatcgcaattcaatccacgaggtggacaattactaccccaagacgtggctgttgaatacagccaatgaactgttggttcgggtctggaacccttaccttcgaccccccagtattgttaagcgagctgaggaatggacctgggaattgattcgcatggaagacgaaaacaccaaatatgcggggctgggacccgtcaacaatccaatgaacatggtggcttgctttatccacgacggccctgacagttactccgtccgccaacacagggagcggttgaatgactatatgtgggtaaagagcgagggcatgctcgcaaacggcaccaatggcgttcaagtttgggatacggcattcatcacccaggcggtcgtcgttgctggtttcgccgacgatcccaaatggcgaccgatgttgactaaagctctcgaattcctcgaagaccatcaattacgagagaacgtgccagatcaagagaaatgttaccgccaacaccgcaagggtgcttggccattcagtaccaaggaccaaggctacacagttagtgattgcaccgccgagggtctccgttcaacactccagctgcaggagatgcacggcttccccaagctgatctccgaacaacggttgaaggacgctgtcgactgtctcttgctcatgcaaaacccaagcggcggcttctccgagtatgaaattacccgcgcttcacccaaggtcgagtggctcaatgccgcagaggtcttcggcggaatcatgatcagctacgaccaccccgaatgcacaacggcatctgttacggctctgtcactcttcagcaaattctaccccgaatatcgcgccgacgaaatccgcgccgcgaagcagaaggctgtcagccacatcaagcacgtacagcgtgccgacgggagctggtatggctcttggggaatctgcttcacctacgcggcgttgttcgcgctagaaagtctggccagcgtcggcgagacatatgaaacgagcgccgactctcgtcggggctgtgacttcctgatcgagaagcagcaggcggatggtggctggggcgagtcataccttagtagctcaactcaccagtatgttcagcacgagaagtcccaggtgtgccagactgcctggtctcttcttgggctaatggaagcgggctacccgcacaaagagccgttggagaggggcatcaagctgttgatgtctcgccagcagcggaatggcgagtggctgcaggaagcaatcgagggagtattcaaccagtcttggtaagcttgagctgtcctgatcttctggatttgatttactaacagtaattctagcatgatctcctatcccaactacaagttctactggcctatccgtgccttgggcttgtatagtaagaagttcggcaatgcagagctcgtgtaaaactagggaaaataatactttacagaaatgtatctaatcaataataacgtgcattgagctggtattgacttggtacatgttgtatctcttgttttctctcatcttcccaaatgcaacatccaccccttcctcgttgtggaggagtacaacacgtgaccatccaaaatgatcaacagaagcttgggccactgcggctccttgaaacccccacgattgtttgcgattgctttcattcgaaccaaccacgtccgtcagaccctgataccatcaccatgaatgctgcagctcagggtgacaaggcctcggccgaatccaactaccccatcgctatcgaacactacacccatgccttgagcgagctaccccgcgctccggcatactacatctcacgatcgactgcctattcgcgcctcaagcccgcaaatggcggacccaactatcaggccgcactcgaagatgccgaaatcgcgctccagctcgccaaagagcggggaaaccgcgagtttatcctctccgctcagatgcgccgtgccgtgtcgctgtaccagcttgagcggtatggagacgcaggatttgtgtttgaaattattgctgataaaaccaagagcgagcaaccgctagcgaatagatccgaacaggtgcaagctgccatgggaggaccaggatctgcgtcgaagggcgccagaaacaactacagcgcccaattgccgatttggaccgccaaaattcaacggaagctagcagagttacccaaggacgacccgaagtgcactgtatctgttaccgagttcccgtcttccgtatacgttccgactggagacgagatgaaggctcagtggaaggccctcaaggctggcaacgtgggagtagccggagcctcgcagactaagacacagccggcagagccccagcagccatccgcagaagagtctggttcaactgctcgacttccagactcgagctccgctgcagctgtttctgttgccccggagaaggttcgccatgagtggtaccagtcacaggactccgtggttgtgactctttatgccaaggggatcccaaaggacagtgtcgcagtcgacctgaaagaggatttggtaagcgatattctgtctggccatgattggactttggactaattctaaaacagatctcgctacaattccccctcccatctggctctgaatacgactttaccctcgacccgctctatgcagctatcaatcctgccgagtccaaggtctcagttaaaggcaccaagatcgaactcactctgcgaaagcagaaagccggccaaaaatggggtgccctcgagggctcagccaccaaccccgccgagatcaccgaccgtccagcggcgcaaacctcgccggctcccacgggtccttcgtatcctacctcctcacgcagcggccccaaggattgggacaaagtcgcgtcgtcacttactgcgaaaccaaaggctgatggaaacgcagacgtatcggatgacgaaggtggtgatgctgtggacgggttcttcaagaagctgtatgccggcgctgacccagagacgcgccgcgctatgattaaaagctacaccgaaagccagggaacatcgctgagcacgaactggtctgaggtcgcgaaggggaaggtggaagcccaccctgaatgattatctacttgctattttctgtcttctgctctaagccgcatgtagcgaggtgtttcctgggtattttagcttagttctcaatttaccgtctcttctcaagttgtttattaatactggttcagcaagtagttcaatttgtcgacaaccaaggctaccccactctatagacgagacaccacagtcgtcccatccccataaagcggaatagcagacccagctccatcctggcggcgcatcgtagccatgacagtcccacccacgaccttcaaagaaaacttcgccccttcttcactgggccaattcatgaaagattccccgtcataaacttgctcgaagatcctcgccggcttgatcctctgcataatcggcgaaatacactgtcctttatcggcgttttcctgctcgtacacagtccacacattcaccggcttgttgccgaagagcgatttgttcgcattgtagagcgcacagagagcttctgccgcagggatctcgcgagccccgtccgaggaagtgttggagagcagaaagccttcctcgttgacgattgccgtgacagagcaggtgccgagtttgtcggcctcgaccgcgtcgaagtcggcccatcggcccattttggtcgtatcggcgtgcactattctccgatgtcttatagcggaaggcatggtggttggatgtttggtaaaagagaaaggagtagatagattgtcttgggtgatgaggtaggtgtttgtgtttgtggatggtattttgctaatgcttgtttcgtatttgggttgactggattattctttccatggtgcgattgagtcggagtatatatacacatttatcactgccctgagaatcccatctggaaaattgggctggaatcaaggctgcaaagaacgaaacccaacacagcagcaacccgccatataattgttggctggtaaggttccacgggcgttatagaccggggtattgtgataagggatcgccggcactaagacgaatgaaattaggttccaagtcagcttagggctgcaagtagctatacaaaagcaaaatgataggctgtcggcgcttagcgctctcgtgaaacttatattggcgccggccccctaaacctcccaactttcgccgatccctgtcctgcatgccataactctgcccaagtacggttggataggcttcttagtctgtttacatcgagacacctgcatcattgacggggatggttggcccggaggtaaagccacgtctccgccagcctgattgagcgaatagatcccctcacttgcaaagtgatgctacaggcatgaatacgatatacaattattggaagtgttccaggcctcaggtgctgacattctacccatgtattcggtagttcatggctggaacgacccattcgcggatccgcgacccctgcttcatggcaaacatttcccccgcctagtaagctgaacctgtaagctaggaatgactgaccgctagtttagctttcatcatacgaggcgcgaagtctgtccaacgtacgttggctctgttggttcgtgtttggtcggctcttcccggctcaggcaatcattggagggctgtattatggctcatcgacgccaatttacggacaggactttgttggaaacgatgtatcgattgcttctaggattttcggaacttgttggcactgctagggtccagttgccatatatccatgtccaagtggtggcgtatccaacgcagtcatgagggaggcgatgtgacttggcttgcagctctttcgagctatctattttacatttttgagatatgcttcgtactaataaacatgcaatgatatccaatcatatcagaacctcattgttggtagccaggtcaccaacgcagggaggaatgtgtcacatccgggtacaagaaccaacaaattgagcttgttttctgtttgctccaagtaatgatggcttatagaatcaaaacagtcttgggcagaaaatatccaacgaatattcccgccgttggtgtgaaggacaagaatgggatagcgtgggcggttatttctgagaacgtgcatccccgtgtttccttctgataattgttctgattattcttccgagtcagtgatcagtggacatatgctcatttccggtgattaactcgttgagttgccaagtttgtgtgtttctatagttgttccttatgttgccttacttctttcatgcccttgagctagtatcgctttcaacttgtttttttttttctgctaaaagtcgtaaaatgtatttcgaacctttgtatatgtccaataaatcacataaactttgagtttactcttcctcttcctcgcccttgctatcgcggtataggaaaaattgtataaagatcgccatatccagcagcagcgtaccagcgctgccaatcagccacgacaagttcaccaatacataccggccatacagcgcagccgcctcgccaggacgacaatgcgcacggtggctgtgatggcccaggacctcctcagtcgacccaccatggcaaacaggcgagtatgccataatagaaagcacataagtcaagtttccaatgcaagcaaagaggaagaacagcagggaaacaccatccgttgatttgcggcggtagttcaagagaagctggggcagacgtgatccaaggtacaaagctgcacagaaatagccgaatacttgacccagaacatccatggtgataggttccgggtctggcgatgctggctttgctgccgggctgacgaaccagcccaccacgcctgcagcacagactagagcgacggccgtgaagttgaaaaggatggactggaggacggagatgcggcgacgacgagcgagttgagcacggcggcgcgcacaatcggaagtgggttcgaagaagggcgttgcgggtgacagatgggtggcatccaccgaggagaagatatcatggaaagagtttgtcgagtgccgtcgtccggcggacggcatttgtgtatggtcttcgggttgctgtcccgctacgtttgtagccgggtcctggatttggacatggccgttgggctttggaataagggatgatctctctgttggcgctggttcatgttcggcactattccgctcctcgtcggaagtaccgttggctgcaaaaaggtccggtgtggcggatggagatagctcctccttgaggttgaatccccggtaatagaagcactgtcccagcagaacaatatctgctaaagtgtagtatactgcaaggatgatcatggtaggaagcacgccttgtaggacggcaccaaggatgttgaacacatcgccagccaaccagatgatgaggaagatgagagagaggccatctgcagagccacgtcggaagttctcgatgatttgaggggagaagacgacaacccaacaggcaatagagattgatctaaatgagttagtattggactaagaaacaaaacatacagatatcgccagtcttagtaaatatagatccaacgtcgcacatgtattaaatgaacatgacatctaacgaaaaacaccaaagaaggaaaaaagagcagacttacccacagatgccgctaagggcctcgatgttcaaattagccgcctgcgagggaaacatgatgcaggtgaaccgtgcgattcagagtcaagtgattctgaatggtttgggaggcgaaacaaggtaaaaagtagaattcccagtataaatgaatatattctctggaagatccgactctgtccaagtcgaaaatagggcaattggaggtgcgcgaagagaattggagaaattcacagacggagccatggatgacgtctggtcacgtgcatgggagtatacaaattagggcagggcatttcttcttgtttccttcatttatttcatttccagcagtttatgaagatacgggttagataaggtgatattcccttcaccatggactaccaattcagagctattgacacaatccttactgtggtcacatgatctgcgtcgttaatagttgccacattggcgcccttgagcatccgtaccgctactatagcaaaccatgacactattgtcctttcataagcagctctaacttgtcctgggcatcacagaaaatatttatagccttcgtctctgtcagcaaagctcgaaattgatcaatgtatccatccttacctcggtcagcttaatctgactagcaccacccaggtcgcgggcaaatctgatctggtagtttccaggatcgctgatgagagagtactcctgcgccgggattggaagtgtcggctcaatatcaagtagcgacttgacatctcctacataaggctgagtcaactgtgtcaacagacctggcgagatagtgaggtgatccaccccagcgaggcagaagatctcctcgacggaagtcaagctagcagggagaactttggtgggcgaattgatggacttatagtatttctgaatggctgcgcaaagcgggagcaatttcgcattgtccacaaatctgaaatgagagtgttaggtaggatatcggagaagagtttggtacttaccctgcttgtacatgcaccctcagttcgttcacataaggtgcgatataagtacagccgacctcagctgcgagcacagcttgagccatgctgaacaaagtggttgctaaagtatgcacaccggctgcttcaagagtgtggcaggccatcattccttcccacgtactaggaatcttgatagagatgcgactgacgtcgaagccgggctggacataatggaacaactgcaaaattcctataaatgatctgatcaacatcggctcaattgagcaaaatcaatgacaatgagaaaagttaaacatacggaatgcattggccgcaatcttctccgatgagtatgagtagtaaggattaacctggacatgaacacgtccacgaatatgttttgccattccaacggccaatctaacagtctattaatcgatattagtcgacttctttaagcccatcaatgctacaatcgaagcatgacttaccgcaatctcgacagccaattcttcgaccgtggttgacgagtagttcggatgcagtttcttcgcatctgcctgtgccgccgcaatgacttcagcccgtgctggcttagaaagctcgccaagtgcaatagcctgagcggttagttgtaacctggttatgtagtatcttcgacctgcttacttggttggaagtacagtcctcgaatggacccagggttttggcgacttaaaaatagtcaattatctgaaaaagatcatataataatctctacgatgtggactcaccttcgtcgtctagcgtatcacagtcgatctgcgtgcgcgaacgcatatagtcgagacctgtctgtactgccatattcaatgtaggtagactagtaacgagacaagtagtcgagtaaagaaagggtgtctgatggagagaaaggaaaaacaaagcgaggaaatggtcatcccacttaccccaaccctatagtgcatttaatggggggttttccggggaaactccgcaggtggcacggatttgtcggcccgagtgacttgacactgcatcgagcactgcatgtctattgtagtgcatgggtaatgtgctaggaagtatgacagtatgagagctgggttaagttcagtgcaagtttatatgtcataacaattagtataactataacaaatcgagggatgaatgatgcttaaagtatcccaatcagacaatattcgcattgtataagataagaaggatatatgccgagagaaacgcctcgcgatgcaaagtggaaacccaccccgtataactatcaaactagatatcaaaaatcaaaatactctcttttgtttggcttctatttggcctggttagccaaccacgcctcatgtgccttcttctggcgttcccagtctttgcggagcttcttcgcccggctcttagtgatctcctcgccggtactatcgcgggtaggcatgccttcatcgtcccaggcgctgtactcgttggtacggaacatctccaggtggctcagtttgcccttctccgccttcttgagagcctcctgctccttcttcagcttttcagcctgcttttggagagcccgagtttccttctctgcccgcaccttaatcatctcttgggtgactggccggactagggcaggttggttctcccgatcttcgagggcgataccaacatcgaagaggtcgatgtctcgcacacggtcgcacagggacagaatatccttgccaatagaatcagatgactccaaagacaccaccttgtcacggaagttggagaaaagctcagcgtatggcttggcagattcagaggcctcttggggtgccgatgcttgggcaactgccgcctggatatccttggcggatattccagccttggaccgtgcggcttcacggagcgtgtcacgcatagccgacagagggtacaggtagggtttggcctcctcgggaatctcaataccagaccagccgatttcagtgctgtcagcagaggcggtgccgttaagaccgaagatgttcaccatggaggtaacccattgggctgcagcttggacatccttggagggcacggtagccttgtcggcaatattgaacttagagataagttccgaaatcgacgccatggcagcgggagtgttgaatgaatcacagagctgatcgtagaccgccttcttggcagcttccagatcagcagcaaaggtggtgtcggtgccggacgactggagagctgcagggtcgttcaccttgaggaaaaagttgttcaccttctcctcccatgagctgcctgtgtttatcaaatcctctgtgatctcaacgccatccttccagccacccaggaggaaaacaatgcgcagacttctcggcgaccagtctttgcgatcaagcgcttctcggatggtagtgaagttcttcaacgacttggacatcttggatccttggatggacagatggcccatgtgaaggaagtagttaacccattggtcattcttgtggtcaccgtgccagtatgcctcactctgggctagctcattgtcgtggtgcgggaaggcaagatcaatgccacctgagtgaatatccatatgtttgcctagcctggctgatgccatagctgagcattcgatgtgccaaccagggcgacccttgccccaggtacttgaccagcttggctcacctggcttcgacgacttccagagagcgaaatcggaagcaccacgcttctctgtcgttttgctggccaaagatccttcgccctctgcagccaacttgttgtccgaccggctccatggctcaagccgtgcgtacggatgacccgcagcttcgaaggcattgatatcaaagtataccgatccatcctttgtagcatatccgaagttattcttaacaatgcgatccacgaaggccgcaatctcatcaccgtattctgtcacgcgagtcaactcggtaggatcaagaacgttcaggtcccgcatatccttagtgaaccggtcctcatatctcttagtcaacttggtgaagatgctgtgatcgtccgcatcaaccaatgcgcccttcagggcatcgaggtaaggcaaaataagatcttgcgcgttcgaatagaacgactcagcaaagagagcagggtctgcactcgagctatcacgggcttccgcctgcacgattacttttgcggcagaagaagccgtcttgatgtgcatcttaaccttggcctcggcatcacctgccttgtcgtttcctggcaaagttccaccgttcaaaatagtcgcataggttttctcaacctcattctggtactgcgacggagggagttcggagtcgagcaagggaaggttcttctttaagtaggcgacgaaagcgcttttgacggtatctaggacctccgaggtaatcgtagggttggcggcgacaaattcattaaacaggtgttgttgtctggcgcggaggatgatctataagattggtgagtcaccgtgcttgaggctgtatacacagctccgagccataccttatcgtccacgtctgtaatgttcataacaaatttgacgtcaaacttgaagtagtcgcgcataattcgccggataatatcggtgctaacatagtttcgggcatgtccaagatgcgcgtcgtcgtaaacagtcggtccgcacgcgtaccatacaaccttcttgcccgcagggtcgatcgggatgaagggggtcttggacttggtcaacgagttccataccttcaatggaggcagttgcgcgtccgggctagcgaccggttgccgccatggcggctgctggcgagaagacatagaactgaaagaagtgcctgacaataagaaccgctgtttgaacggtggaaagaaacgaaaggaaagaagggcgggtcgggggaagagcataaagagggaaacaaaggcaatggagggggaggggctcttgtcaggaccagatcgagtcatccatcaactgcggactggctgtgattggcggcaacgggggatgggaggaccaagccctgagccctaattcgtggcccaatcaggcaataggcatgacagcctttttttcttggagagacagcgagttccaaccgcaagttagggattgtccgtaccaattatccgcgctgatatcgcccgccatgacttccccattccttacccggaacgccgtagcggatgcagatagtcttgccctcttgcaactccgtcgcgaccagatcattccgacgatcctccgcgaccatgacgatgagaaccaaggctattgggaaggcaaggtcaccaacacccgcttcggctcattcccacacagcactctgatcgggcaaccgtggggcgcgcagattgtcgcgtcaaaagttgatacaggctcgcgcggtcgcccatccaccaagcgcaaggccgaagagctcgatgctgagacaacaactggcgcagaggaggacaagaagcgaccatcattaagagcccccgtgtctgcggatagtgggttcctacacatcctcgccccgactcccgaagcgtggaccctgtctcttccacaccgcacgcaggtcgtctacaccccagactacagctacatcctccaccgactccgcgtacgaccggggtgtacagtcatcgaagccggagccggcagcggctcgttcacgcacgcctctgcacgcgccgttttcaacgggtatcccgggacagaagaagcaaccaaacggcgacgactggggaaggtatgcagtttcgaattccacgaagggcgcgcggccaaagtgcagcaagaacttaaagaccacggtctcgacgggattgtggaggctacacatcgcgacgtttacgaggacggattcctgctgggcgatcccaaaaccggcaaatcgcccaaggctaacgccatcttcctggatctccctgctccctggctcgcactgaaacatctcgtgcgaaatccgcccccggggcaggaatcagctctcgaccctgagtcacccgcttatatttgcacattctcgccctgtctcgagcaggcagagcgtacaatccgcactatgcgcaagctatcatggctcaatatttcaatggtagaagtcgctcagcgtcggcttgatgtcaagcgggatcgtgtcgggctagataccgagggcgttcgcggagctacaatgtttcctaagacggtcgaggaggcagttgcaaagctccgtagtgatgaacaacgtgccaagctcatccgggagaatcggatgaccaaaggccagccagattaccagccaattgcgaaggagacgccgttctataaagagaagaccgatgtccccgtttatgctcagggtcgtttgactcatcgatcggagccggacctcagaactcacacctcatacctggtctttgcgatcctgcctcgggcttggtctgaagaggaggagcaaaagtgccgggatcaatggccatccgccaaggtcgcgaagcccgataatgagccgaagacaagcaagaagcaaatgaagagagatgcggcagtggaacgggcaaggcttcgcgacgaacaaaagcaattggaagaaaagtcacagctagaatcgggagataagatcgaggaagaaaagttggaaaaggagagcaccgaggcatgaggatgaagataccagttgatttgatttgttagcataagattcatagccggattgtggtattgttgtctttgaagacattctacttcacacatatcatttactcaaaggctctttcatcattgaattgtacgcaatcctggagctaggttggtcgtcaactcctccgacctcaaaccagcatttgcaaatccttacagaggcatactttagcggcaagtatgaattcatgggcgcatcttgactgaagcagctggtatgagaagttttgcccgagaagcagccgtcttgcaggccacctggagacgaacatagatcacgatgataaacaagcagcgagaatgagtactacaagggatcagaaacacaaagaaggcaacgctcatatgtaattctctatgggacaaaaatgctatcaaggccccttctaggtaatggaatcgtgaaatgcaacaagcgaaatgaccatgagtagatggtatgaacaggaatataggagctctcagaggttattttcagctctgaacttgtcccaggcttcatttagggttccaaacacagatccagcaatcatacgctgctcagtggtggcactggtagagatctaatatggaacgttagtatataatctgccaataccacctaagaaggagtaaacataccttatcagggtgcaccttggaaatccccttcatgtactgaatcttaaccttattcggcagcaccagctccgacaagccaatcttcttccacccagcctcgggccatagcacagagtctaagctacccagcagcgcacgcaaattgtcttgcttgccacttttccaggtagagattttcgcgtcgacgctctcggcaagagcaaacttctcttcgtcggcacgctcagccgcctggttggcttgtcgcagacggctgactgcttcaaagtccgtcccggatgccgacgtggccgtgagaccggacataaccgaggccttcttaggcggaggtgaaggccgatttctagcaggggctgtgggtttagattggggcttgttgataccagccgctttctcgcaacggtttcggccttggatgctcgtgctgccaccgtgaccagactctacagccagcttccacgcctgcgctgcatcgttccagtgctctagttgctcaagggcttcggctttacgcatcaaagccttgccgaagaagtctttcataggcttaggtggttccccggtgcaaagatcgattacttccgattcgcccttagatgggccaataaatgttaaaatgatgtcggcgtcatcaatggcggacttgggttcaccgatcttcagggccgtcattgcacgattgctgcggatgataatagtgataggatgtttgtcaggcagcattccaagagcagtggaaaagctctgatgggcttccgcgtagtcgcctcttttgtatgagtctgcggcctttccgcggtgccggtgtgtcgattgaagcgcctcttgggatacaggtggaatagaccgtgttggggctttggggcgtacaggaatggaagctgagcgtgtcgtaggcatggcagagggaggaggctttgaacgactagctgaaggagcgggggaatcaaagagatcgacagtcggctcagaaggcggcggtggcgcctggggtcgcttgcgtctcgcaggactaacatatgcttgagccgtctgctcttcatccttaaaccgtgaaactcgagatttaggatcctgagagcttggtcgggatggacgttggaggaagttgggttgttgccttggctggacagcaccaggggactgttgagtacgaggaggctggcttctcggctcggggtggtgggtttcacggtgacgaggtttctgaggccgaccatcaccagactcaagaagaagcgcttcattggtgaaatcctgctgctctcgttgtgattgagccggctgatcacgacgatctggacgctgcggctgcagaggttcatcttgtggcgaggatccatctctcatccaacgcggttggctggggtcatgctcggcgttaaattcgtttaccgcttgttggaatttcttgctgccagtcttccaaagcgagccggctgatttcaacagggtattaccaaattgggaggctaactgcgcaggatctttgtccgctgatgccggactccgtctgtcctgacgtgatcgagattctgacatttcttctctcatccacgaaggcctgtcgcggttgcgactatcgctccttgcagcgcgatcagtagaatgagttgtactgggatgcccttcagtcttctgccgagactcggcatgggcctgggtgagaagccaaccaacagcagcctgcacgtcggtcccggactcggtggtattcaaagcccggcgagctttatccgcggggaatcccatatccaccaactccgcaatagcccggtcgacctcgttggaaggcataggagatgcatcttggtctcgtccttgagttgagggtgtggcagatttaggaggcggttcggggtgagggatatctgatatcggcttcccaagcaaaccaaggaaatcatcatcgtcgccttgttgaggctgaggagcgggagcggatttcggcttcaattgattgagaccgaatggatcatcgtcatcaaaggcgtccatcccccccgtgttgtcctgcatggaaatccccccattggaaggttctgagcgactgttcaagtcgattcgaggcgacgatctcgaggaggtggggattgggaaatgcgtcgatgcgtccaccggtgcggcagaattgaaggcagccaggagatcctcatcgtccgcgggcggaggtgcagatcgaggagcaggtatagatgcggggctccgcgtgcgtccttcgaaattgtcccagaattgattgttctggcctccgtattgcgattcgaatcgactgcgattttcggcttccttcttagccttttcctcctgcaagcgcttctgctgttctataagagataggttcttgttcccggcggaagaattgaatgaaaccaggttcgcgaagctatctccggcgggagtagcgggctttggtgagcttgagcggttcgaggtcgcagataacggtgtggacctgccggagccaccatttgatggtatacttgggtacaaatacccagagctcattggcggtggtttgcttgtgtttgagtcggaggaccaactcaagccatttagatcctccatggtgagtgagcgtcgcaaagaatgaaggtgacgtctggtgggttcgaatgaggattaggtcccagaagcgggatgaaggttttccataatctcaccagctcacaatatataaaagaagcccaacgcggtttcaatgatcgtttgctgctatcaagcagatgcggaacagttgccccctgcatgtgggggatccggaccgcattgaggccagcacgtgattatacatttccttgtctgaggaaatagttatcagttcactcgtctggctattcaatgtcttgagagtgaggttaaacatctcagtaatcaattgcctctaacatgaactaacctagtccaaggtgtatgtgatgacgtcgatgtgagagatatccagtccacagaccttcaactgagcatcttcttggtactacgttttgatttctcaacaactcagtgatcactcaaatcgccctcagtccctaaaacaacctgaggactattaacggatattgccatggccgcttcagccaactgaagtaaacgaacccggtgaaaccgatggttaaatggaaaagaaacaacctcacgatacacatacaacggatgaggaatatatatgtctctatgcataaatgtcaccactgactcaaaacaccccttattaatggaacctgtggcttcattggcctcgttctgatttgttggttttcgtttgagtggtctaatacgtaatgtctgcttcgttctatcttgctatgtatgtcgtgctgatggatatatttgcaggtttgatccccggcaggcgcccttgaatcaccctcagaggtaatggcaaagagaacaaggaggaggaccaggagaggaggtgccagagtcgttgattgcacctgtgggctaatgagcacgattaactcgagaagcacttgtggaaagtgtaggtcttggaggaaatacgtatacatactaatcaagggtgtctacctcttcggggtatcccacaaggcccagtcatgaaatagtccagaccattctagagggactgaaaaagaatccaaaagcttacactgtggagaccatcaatattgattggtaaggctatccctgtaaaatgcagtaaaaggttcacaaaagcaggcgtgcttcgtcctgaaaccagtgcttagggtttccacaatgcaaccttttaggtcttttctcggtgcttacttgcaggctgcaagtccactagagttcgaaaatatgccaatgaccactcaatcaactactccgtatatcctacgaaatacctgctgacagtctccaaatcggcaaaaagacgaatcaatagtcgagaaaatcatcgaggcccgaatctaaaaacgctcgacctataggatctaggcatatttgtagggccgaagcctagctaaactatcactcaatcattgaaccaagaatcaggggatcacccggtatccaagactattagctgtagacggggcatgtggtatccatttcttctacttttgggccaacgcacatcctatcccaatgtgggatgcgcaatacttcagcctagaactattttgtcttttctggaaacttcaatcaggggtagttggagacggaaagacccaaataactattccgtaaatggtagcagacatctactcatgttctttcttggtcgtatagatctactattgggtggcatttctacctgccaaactccgttagcttgcgcgctaatgcatgaagctttgctcaattggtgattttcgctaaactctaaacgatttaacgtcatggtttagcggatgatggagcccctttttgacgctttcatggaagacattagtccgttcggtgcttgattgtgtcagtggcgcaattacagcggcaattcagcctccatgtcagctcttggtagaaccatacagagtactccttgggaaattttataggtgcgaatcaaaaagtagcaataagcagtggctgactaagatcaagtgaggttatgtccactcgacgaagatcatcatctcaagcgaatcagacaaagcactgtatgctttgtggctgcaggcaaccaacttggtatgtgatatgatagcgacctcacggccccttcctgaagtctgcggtgtcatactccactagaattggctgctgcacaatatcctgtgggagattccacctgcctaccccggcatcccaagcttctgtctcccctttctggtgcccagtgacaaaagtgcaatatagatctgggtctccaaagaccatgattccgcctccaattcggacatcatcgagtgcgtaattcagggaatccgaatcaaatatagattgcgtcaattctgcgcttgcaattggtctgaaattctacaaatgttttcattagcaaaggcggttcaagcatattctttgccctgaaacagtatcccaggggtatgaggagaatgggcaatctatacctgttcggcacccccgcctggggcgaaaaacctcctaacagtaatgtaccaacgctcttctggtatttttacgtcgtatcccgtgaatctgatatgtgctggtaatctcattttcttggcatgaataacgagagtctagtcggcttccatcgtaggaaggtctgtaggtataggtaatatcccaggttgactcgtgtcatcgacgttcttcaagaactagcctcgctggctaagggaaagctgcttcagtttatcactgtcctagctggagatagaacagaatgaatgatatcgtatcatcctggaacaacacgaaacttgtagagtaggatccagaaacaaaatttcttgtcagaatcgtgactactccgttggggatgaagaaggtcagaagggaatgacttctagatcattctgaatcacgtatgcagggtgatcgatagtcttgacaagttcatcgagtcctgctagccaatagatactagcgtggttgagattagctgctaagctcccatacaagaaaagaagaaaacttactaagctggccatttttgtcaagatgttcttgagtattcaccgggatcataatcccagggtatccttcatcgagagtccatacagggcggaacccgtgcttcgcaaggttgcgatggttgcatactcccgagctagaacggcatcacctttgtcgtaatcagaatctgaagtatccaactcttggtcggggtcttcgtaccttgtatgcttgatggaaggtggattaagtctgtatatatgtgtctggaggagatgaagaaggcgagagtgagaagttagagtgtgagaagtaagagtacaagataagggaagtagcaaacaccatccgatcatggcaccttgaaaggaagtgatgtttgaccatggtagctactcagtgaatccatcagtaatctcacgtttgctaataaatgtactatctaggtatggttgccaaagctaagcttgagtggatgagtggatttcgggaattccgactcttccgccagtcgggaaattacgaagtcctctctttagcgaaatttgttttataatttcagctctcactttagttttgttttttctcgcttgctacaggaccgaaaatgacagcaaaaagacagtaaaaaagatgcatgaagaatacacctacgttgtagaaagaatattaaagatgccgatgacaaggccaatcaggtcacaccttattagacttaattccatctgccgtacatacggagtactccgtactattgccaaagactaggcccacacagggatcttcattggcttgaggatatactcaacggaagaatatttagtaggtgggtataccgtctttgcgggaccgcgttccgaatccggtacgatgtatccaatcgatatgtaatctagaccagaggtcacgaggtcacattgtccaacctcgggaaggaatgtgatcgtgtattatgtaatctggttttttggaatggcagaatcgcggctgaaaaggcggaataaaggattgagccaatagaagtatagcaatcacgtgggcggtaggcttaaaaatacgtccgagagtaaagtttctaaaaccgagggggctaagcctaattcagaagccttggtactctttatggtcaaaagtccaggagcacgaataatccttcgaaagtgatcgttagaaaaagtggggtgattttaacggggtttggcttgattattatattcatctcctgggcgaaacctgcatcatcgtggaaccaaatggacattgagatactgttactccgtagagtaaggtaagagtgttggaatggtactcgtatatgcttgtattgagactatacatagtattcaagtagaggatgtttgcggtaaaaaggaaagtcggaactccgctttttcacagcagcggaaccactcgggaggccgagccgcgcggtagcgaatggaaatccaatcggtggatcgcagtgtcttgcccctgactttcagggcttggacaggtatggcttagtcagtgcgcacaatgctcggacctgtcttaatattgatgtaggtaggatatccttcatactgatgatactctgccagccctcattcttaagaaaaagaagaatgaaaccaaaataatccagatttaagaagatcccaaacgaaaaacagagttaagctgaaacgacccaacagagtggccaggcccgtgcttcccgttagctgggtccttgggtgcattgcggtataaatggggggtaaggggggcttgatggtccggagatgaggcccctaataagtaaataagagtcaagacaatcagactgatcaaggattccaacatcaaagttaatgatccttcgcatagcctgcacggtccactgttctacaagtacggagtacaacatagtaccatgcagaaagaacctgggcctggaatactttacacagacgtccagatattatgtcaaggaggggcagattagggcagattaccaggtgaaacctggtaatctaggcttgagagacgttgtctatggagtaggttcatactatatattaggaagcgacaccttcctcttctagctgataggcgtagtgtgctgaccaggaggcaacatcgaaccgaatcaattctccggttttcggtgtgcgttgtactccccagcacttttttgggaacccccctaactcaaccaccgtctattattaacactcttaattgccaaacccataaaatctccgaacatgcgctcgtttagatatataccaagtgggtttgccctgccgcatcgggtaagccgtgtctttttcttctcgtttctttttttcttctttttttctctcgaacggtacgctagtccgtgcatttccgcgtgcgttccacggattcgccctaaacgtacgttgtatttggtcgttcccctaatagggcatggtctgatcgatgcatgtgagctagcgatctatacacgtaccacccagtggcgcctcggaaccggaagtgatttgatattggcattcctctttatccattcgcctcggccctgattcgctgcccccttgcacaagtcaaatgatagtccgttctcttgctttccgactggtcccctcctcctgattccccatacatacggcaatcgatcctaatctgccctcgggaaatatgtacgcattccgtactctacacaagggctttgtgtgctactgattatgctgttgttaatatgttgtatatgggttgtacggaaggaaatgttcggtactccatagttacccccgtagttctaaaagcaaatcagctactccgtagtctgggcgtatccggtaccgcccttcacatactaaagtaccagttgtggattgtatctggtaccttcccaagcttccgctctcgttctcttactcgattcagacggcgccggactttggactttgccagactcgcccctaaatcgactccataaatattcgaattcgaatattcaaattattaatgcccggacgtctagcccgtgctaagatgacccttcgcgagagctgtccacgccccataaaaaaaaaacaataagtattttacctctttggcctgctttggcctgctttgcctatttttacttagtctaccctagagcctttattatgcgatgttaaaaaaaataaaaataagaaaaacatcacattcagatgtcacttccccctctttgtaaactccttatccgaactacattctcttctccctgcaatccctccccgttgccccctttcaaccctcgacaagcctggggtgaacctcccaactcgataccatggggttattcaagcgcaaagattccaagaactccattcaaagcgataccgagaatgatcccatatcaatcaacagcgctcgtacatcacatacatccctgagatcgccaaggtacaagggaactggcccgccatcctcgatcccggaactccctatcgccagacccccagatccagcattggacccggccgcatatctacggagcatccatgccgtgcgcgaacgctccaacatcattctgaaaaaggccaaaaagaaccaactgcaccatttcgacgtcgacatgagcaaattcgaagctaccgcctcttacgtcgtctccatcatcaaggtagagaaccaaacgactcgatcctgtgagttttgcgctaacgtgtattcccaaccagcgagattatgcgccagattatgagaacattcccccgcatggtcgctggcagcacttcgatgtcggcggcagaccgcgtatcaaccagcttctccagtcctggcccagtcgcattgatgcgcaggagcgcacccgccgtttgattgatctgtttgtcgtgtccgtgctgctcgacgctggcgccgggaacgagtggtcgtaccggtccaaggagtctggtaaagtcttctcgcgcagtgagggcttggccgtggccagtttggagatgttcaagtcggggcttttcagtagcgatccgacggagccatgtcaggtggatggcgcaggattaaaaaaaattacggtcgaggtgcttgccaaggcgatgcagcattctgatgagaatccgttggccggtattgaaggccgcacgggcttgttggtacggctctccgaggcacttaacaatcaagacttcttcggtgtggatgctagaccgggaaatatgctaggtgaggcgatctggtggtgtgtgtttgaacagctactaatctttcagattatcttctcggtcatccgtcaaccctggcttcttccgtacctattgttccgatcaccactttgtggtccgtgcttatggatgggttttctcccatctggccggaatcacggacgcagattgatggagtatctattggagatgcttggaagtgctcggatctccccgattgtcctcctgcaaagcagtgggagagcattgctccatttcacaagctaacccaatggctatgctactcgatcatggttccaatgtcaaaactgatgctcatccacttcgccgggagcgacctcctaacaggccttccggaatatcgaaacggaggcctgcttatcgacctgggactcatgaccttgaaaccggatgatatgcagcgtggaatcgatgcatataaagagaatgctcagatcaagggtcagccaagtgtcgaagtggcaccgctcttctgcgccgacgacgatgtaattgtcgaatggcgagccgcgactgtcgggttcctggatgagctcctagacgaggtcaacgctcagctagggcttaagggctcggacgagccattaacactagcacaaatgcttgaggctggcacctggaaggtaagcaactcaaggattctccagttcgataaattctaacaagaaccagggtggtcgcgagattgcggaagtttcgagaccaaacaccaaggaacctcctatcatgatacgatctgacggcactgtcttctaataccctctattcccattttaattgcggctttgatacctgatatcttcgtccatcatttggttttgctatttgggacgagctttttgatgaaatgaactcttcatgaccgaataccttcatacctatacttcacgtttggcttttctacatttacttcaattcccttacttcctacttcctacttcctttattccacctttccttctctcctctctccttctctttccttctccttccctttttccttctttttcctaccttgagccttctctcttttccctctctatttgaggctattcatcagatttaccactggttttgggcggcttatttcatactccatctcaccttttttttttctctctacttgacaccctcatgttgataaaagccatttgaccatagaacaaagatctatgattttcggagacccatgagatgtcgtcatcccgtaacctcggcccaagctcaaatagaacaaacagtgccaacagtgacagtgccagtgccagtgcacgattgcgaggtctcatcagatcagtaacttgatgaaaactttagagtagatagattgctggcatcgtcttttcttcctatctcatcccacaatctatcccaacactttagaacatcctgagatcacgtgctcgggacagcattgttccatctccgcattagaagttggagctcacctgtcacctttccttatcttgctctctcgtcctcaatcccgttgtcaaggcagaaaaatgataatattggactcctaaccggaactcgataccattgcacctgactgaccctgtgaaggcactgagttgccctccagatcgacccgagttgcccccgcaagagcggggcattcagctcaacggcagcgccacgaacatctaacaccatggatgctcggaagaagaagagaaaggtgctcctgatgggcaagagtggatcggggaagtcgtccatgcgctcaattatcttcagcaactatgtcgcaaaggatgtgcggcgtctaggtgctacgattgatgtggagcacagccacgtcaagttcatgggtaacctcacattgaatctgtgggattgcggagggtgagtaatgcgtactccttgcaatccgggaggcatttcactaacaccgaggttttccagacaagatgcctttatggaaacctatctggcctcgcagcgcggcaacatcttctccgacgtcgcagtcctcatctacgtcttcgacatcgagtcccgagaagttgagcgcgatctcgacacctaccacgcgataatcgaagcgctgagcgagttcagcccaaacgcctacgtcttctgcctcgtgcacaagatggatctaatccaagccgagcaccgacagcgcatctatgacgagcgctccgccgtaatccgcagccgatctggcgatttccgcgtcgacactttcgccagtagcatctgggaccaatcgctgtacaaagcctgggccggaattgtgcacaagctcatcccgaacctaatcgtcatcgagcgcttcctaaccgccttcgcgaagaaaatcaacgccgaagaagtcatcctcttcgagcgctcgactttcctcaccgtgacctcggtgacctctgaggtcggcgagctgaatccgatttacgaccgccacgagcgtctctcgaatatcatgaaggcattcaagcactgcgccgcacggaacaccctcacaacaccggcttcggcgggcttcgtcgtcatgcatactaaaacaccccagtttaatatcttcctcggccgcttcacggataacacctatatcttccttgttgtacctcccggcgaggcttcgtacaactgcgctgtgctcaacacaatgcttgcccgcgagggattctcgaaagcagcggctggcagtggcggcggcgatggcttccctcttcctccaccagaaacggcagatgatcatgcgaatgggtatgggtatgggtatgggaatgggtatggacatgggtatgacaatcccacgtaaaatgggtagttgatttgccattgggtctggctttgtatagctacataactactaggggatgttgtctttcccttccccccttcccccttacctcccttttggttttttttgttccttgacttctgaggatttatgacaaaatacagcaggcgctgaatgatggcgttatggattaatgttttcttcttctttctttcttttcaactttctgagaattgagataccctgtgggatttttttgtacttttttttttctaaaaatatcatgaaaaattacccaggtattctgcaaactattgagaaagctcttgagttttatataaaatctatgtttttcttccccattggtgatggtgatgtatatatgcttgacgttgtagatcatgcaatcggccttgtttcaaatggaactgccatgttaaaaggaatacaggcagcctgataccaatgtttctatatcaattccctgctgtatactgcatagaagccaaatcgctacaataatgacaacaagaccttgatcattcatggcatttacttcatacaataccgcagtgacataacatttcatccgaaccatctatattcctagcatccgatgcagaagcgaaacgcataagagaagaataaaaacatgggagggatttgattatctatcggaccggccggcctcaacggagaaggatgaaaaaaaaggtgggaacaaaaagataactcggacaagaagggcatgaacggctgtacaaaatcaatcatccagagagcttgaacgtttttcattggatttctggcatgcgcatggcaatgtcgcccgactgtgtgatgtatcgcacccaggggagagaggggtattgcagctgtgggagttgattgttagtgatagattataagaatccactgatgggaaagacttacctttggttcggtgatcttcagatatcgcacttggatgccgctggtcgtgaaataggggatctcgaacttgacgttgatgggacgtttcgacttgcctacgccgccggctccgcccatgctgcctccgaacccaccggtcataccgccgccgcgctcgtcgtcacccttgacagagggtagacctagctctgcgcgcatgaggaattccttgccgccgccgaattgcttgatcttccagatgatggcggacttctcgggagcgtagtgcacggttccgatatttgtgcggaagcgcggggagtcggcgtcttcggggacggggacgagaatctccacgttgttggcggtactgcggcgtttgaattgggctttggcctgtcgtgaaatactggttagggattgatatttggtaaactgggtgggaatgttaccttgagcatatattcaattcgggatcccgagtgcgattcaaccacgcactccacccagatcaacggcttcacttgtgtgttcagtcggtagctcatgagctcgaattcgccgtccggagggatgaaactgattgtgcggtcattctcgaagcgcgaaagtcggacacactggtggaacttcacgtcctccatctcgaccgacttgcctcgtgtagcacgacccgtggtctcgaacatggctttgtcgttcaagcccaatcgcaactctggcataccactcagatagcacttcatcttgacagcgcccagaatctcagagcgcaggacgtttccatttgctgaaacgagaagattgagagactcgaccacgtcgaggaagacttcgtttttgcggtagcgtatcccctcgctgcgccaggagacagcatttgtgacagcgatgggtggccgtgcttggacatccagcttgtgtgactcttgggtgatgtatctggtcatagcgcaggtctgttagttatgctgtttcaccaccacccccgccgcaccagacccagctgcttactcttgtagaatcttgctctctgttgtctgcgggtatccaaaatccatcatctcatccagtaattcgtaaatgacgacgaagttatcccgaatactctcctcctccaataccttgaaatattcggtgaagacctccaccagcttgtggaggaagagtagaatttcggtggcatttgtgtttcgtttggtcaatgcgaggatatagaggttgctgtggcggatatagaggtactagacgaaaacacccctgtgtcagtacgtgggagcgcacaataggagacactcaggagtgggcgtggtcagggcaatgcccaggctcggtgggacgcacattgattccctcgtgagagaaacagggaggaactgctgagctttcttcttcggcatcactgaggaggatagggaatttctcgactgcggacatgggaatatctccgcggtaattgcgggccagtagggtctatagatggtcagtgggggcttgtccctggacgcattgacgattttcccggcagggggtcgcatcgccctgttctgcacagtttccaatagcctaccttgcccttgaggtcgaggaagaagagtgccgacgccatgacgtgtcaatgggggtaaatagatgacgggagaagtggtgatgatctggtctcttgagatgggggtgcgaaagcaaaaaaataacaaagccaccttatgcgcctactgcagcattgtcaataaagcagtaagaacaaatagaatagcagcagatgaggtgagaaatgaaaggagcagatcagcggaggattgttggcgatgcccgcatgtcccaggccggagatagacgccaagcccaaagcggactagcgtagaaaatcacacataaaagcccgtcgcgcacttttttatttcttctttcttcaacgctcccaatagacagttcaaggcagtataaagtcctttgtgattttctacagctactccggcattctgtcggagtgctatagtgttttgattactaccttgcgatacagtggtgcggagactacgatcttacgagggttccataagagctggccgagtactttctctgttactcgggcggcgtcagaggaaccgtacatttctataacttcaaatgaattttttataaatcgaatcttccttgtaaattgtcctaggtgcttattttgattgtaatctgctccattcaatctgcaagtgcaactctttcaagtggtatttggcagtagtctgagaaatcaaacgatataaaaaaaacaagtctgtttagaagtacatgtacaatcgtagaggttccccgattgagaagttcactccccagtcaacctaccaccgatggaaatatcaaacaagataacgccctgaaaatgctccaaaggagaccaataccccaagcccaagtcttggacccttacgagaccgacttgagtcctaggggttcaagtatccgctcacgagccaccttggtggcaacaactcctcccttctctagcgaaacagcgccaacgatagcgtacatggtatgcgcgagaacgagctcaataccggaggcacggaggtcgttaggctgggatcttcgttagctggtgatcaagaacaccaaagactaggatggagacataccattctgggactccatctgagaaccttctgtaactcgtacttgtttgcaagctcagcgagcttcgaccgctcggtgaggatcttcttggtctcaccagagaggttgttcaatccatccagagccgggtgggtgaaaggcacgcgaccatactcgtccttcttcggtgcggcacctgtgtacggagaatcctgtgccaaagccagcgatgcttgcagctgcacaatgcgttttcccaggaaggccagtcgatcgttgaatccgcgacgcccttggtcgaaactcttatgcgtcactgccaaccacttggtctcgtccgagaggagtttgtcgccgccattgccgaacaatcggatgtagaatcggtctagcaatagcggatctgcattgacgtggaaggtcgggcgcttggagtcaaggtgcagactgaacggggcctttgccgccgcgggagtgtaggaccaccggggcttttcttgttgactggactcctccgatgtagaggtcgcgaagttgcggcatgggatgactcccgcaattgggcgaacggcgaatttggatgcagcgcaggcggtcctggccgctcgagaagaaaggttcaaagacatggggtcggtggtctgcgtgtctactcggagttgatcgaacggaaagcaaagaattcggcctgggcggtgtgatactgccggtcatcaagtacccagacccatgagttctatgttcactgttgctcatgtctgtttttcatgactgcaattcttacaaaaacttgttgctgaacttaattctgttcaattgccatctcgccggtttgacatgcagttaaacaaccttggaagccggaggcaaccgggaccttcaccgctgctgcgcggtatcttctgctcgaatgcttgaccttgtgcaccggatccgaagcgactaacgctgattccggctgttgcagcctaccacaggccagcatggctatgacagttggaggtggaacacacacaaacttccgactctgccatgcctcgatgcatatatgatcaaaacggcatatgactcacattaattaagcaccttggaagcctatgtggaacattttagcggtcaggctatggagcttctgaatgatgcttcgatatactccataccgctagtcgcgggccaaatccagcacacataggctttcgtttagcttaggcacggcccgctatgatacacgatgtgtatttaccccagctgctgttgctagcagctttgactcatgttttctgcatgtgcccattgaaagttggggttcgactgggtgtagatggtctcgcggatatccccactactttgtccagcaacatccttctctggataatatcgctattatatgaaccaataggaaacctgtgctctctcaccttataggttataggtccaatagtgctgccaggtaacatcatctgactggctgacgggcgacgcaaccgaccatgagcgcggcccaaagatcagggacacaggtctccagccgctgcagagaaacggtgggaaatccaaaagaaaagaacagaaccatacggaaggagctaggcgatcaagaaacattcaaaagaaggttcggtaaccttctcggaacacagtcgttccgcgaaacctgccgggtatgcagaggccatagctacctggagcacggggcagtgtttttgggcctgcctggttgcggatgtatgcagctggaaagctcagctgaggcacagtggttggctcgaacggcccatgcctctctggactgcggaataacggccctgctgtatgctgtatcatcgtagcctgagctcgtcccctggattaggcaagagactgtcatgtaccgaaggcaaaacatgatccacgtgtattggcgttcggtcttatttggccgtgctccataggtacgcttcctttttctcatattgcctcttatggtcggtggaagcttctacgacttgcatatccattattcgcacgactaagcaagttcgcaacccacaatgggcattgtgggagctccgataaaaggaccgggatatgttaatgacagtgcctttgcccatcttcgaaaggtcctaagtttgaaagacacaagaacacaagctcctcaatgtttgatggcctcgaattcatacttactttttactaaaacagcagacggctgttcaacccaaacattattactaaaagtattgaataagtagccaacggcaaatcatctagagcgaacccagtgaaacagaatccctcaacagactgcaggaatccgaagggtcagaccgctggtggaactctgccgtctgcaggcagttgatccgggggagaaggatttatactcgttcattgcggacattaagttgtatactatttgctttttgaggaaagataatagggcaaagtggatctacttccaacttcctgtcgatgcttgcttccggggaaatgaaaagaaacaaaaatataatactcacgatagcgggtgtgactgcctgcgggtactatctaatggtttatacatcaagtcttcacacgggcccttgcagactctaccaagatattgatcttcacggatagtcatccccaaggtccacggatagcaacgggaatatgaccatcgccaaacggctttttgtcttgatccttgatcgggatgttcgacagggtagcggtgtgcgactcatatcgatggcgacctatgaccccagctaaacttgagtcatttaaatagacatggaccagtccggatttcaggtcatcttcctttaaaacaccagagttctttgtcttcgtccttttcccgtgtttcgttgcagagctatacttcctttctctgtcaaccctgacttgtgtgctccatttcactacaaccacactcatttcgtgcatttcaaacatccaaatggctttcaaccctgcttttgcccatggcttccagcccacccctgcatcgccggcccagacatgctatacatttacgggaagcgacccggcttgtgatcactccgtgcaagatcctccttcaccccgacctttccctcccaaccctcctcctagtcctgcttagatggcagttgcttgggttttatttgcttggcgttgaggcgacacgggacaataggtgagtgttgtctaacgcagccatattctagatccgcaagatatacaacggccaagtcacggagatctgagtgaatactaacttacttacagatcataccccaacgcattttaactgcggtctgacggggatatgcattgatggcgactacgactgggataccataatacgatgtgtatcggtgctggtacaagaagaattgcgggtggaaaatggcaaagtcacgaggcacactggaccctaaggggactgcatgtgtgagagtgagagtgaagatggccctcgagtgacgggttagtgacgggttagtgacgggtttacatactcgatgtgtttttctcatccgcatatccattgtctggcaagatagcttaatggaactacatcaagtgggaccgattgcattttcacactgatacatgacatctagaagtaggcgagaagagcatctagactttcacaactcaaaattgacatactcgtatattcagatcgtgcaagtaatctagcccaacccgaacgcaatctccaattaaaacagctgaacagacgaaaaagaatcagcgtcttttgagcttgcgccaagtgacccgattcgtgtatattttagaaaatcaatttagtaacacatagggaaattcggaggtatgggatacggaaacatttaaatcaaagcaagaccaacagcactggcaacgctgagaccaatcacagtccagccagtcttgatgataacagggttagtgagaccacggccgagatcccacatcaagtggcggataccgttcatgcagtggtaggtgaaaggaagggccagggtagtcttcagggcgaccttggccgcgaaagggagggcacccatggcagcgaccatggaggcagactcgatgtgccatccgagagcgggagaggcaaggtaggcagtagcccaaaggtagagggtgccggagagagccacaccagtgatacggtggagggaactaccgatccagccgatctggggcctgtagatgctaagatgaggggcaacaggacggcgaagacgctgctggacgaggatctcgttggggtcctgggtgtttgaagtgacttgtctatagaccatattccctggttagtatggacttttggagattgcggatgacgtaggcattcggcatgtgcttgattcgaagacgagcgaagcaattaaagcttgtcgtttaagcgctgtataactgaccttgtctgaatgttcttgctgagggcaacggccacaggcgaagcgcccatcatggacgaccgcatagcgagcggttgctggacggcaactgtccgggataagttagatcgcagattcggacaaggtaggaattgggctagacatacgccgtcgcagcgattgttgggcaagcttctgggagaacattgtgattgcagagttgagattgttctgtttgatcaggatagaaatcccaaatggctcgcgatggctcggaatggacggacgacctcgggtacgggagtcttaagtcacgggacttgcatccggtcgacagcggctgccaatcagatccggtctattaccagccggaatatccttattcccgacgcgctaccgtggtcatgtgactgctcgcctgttttcccactttcttcctttcttccgtccgctgctctctcttctttctcttcctcaagagtctccgctcacgtcgtctactggtcttggctgggatgatgtcgtcgtgttaagctttccctcactgactgcggctttctgtcgtggacgccgagggatctagaggctctcagaaggagagtcccgtcgttaatcgcccgttccactctaccaatgaggggaaggggtttcatattcagggatacatactacatgtatcacatccattgatgtttgtagatcgccaggtttttcggacgcagttggtttgaaatgtcactgcaactgttgaaaagcctgcattcgctgtggagaagcatccagccgaggcatttatgtttgcacggttgctatattcactcgagttatgcagttatattcaattcataatggacaattgaaacaatgatcttacctcttacatgcgtctgttcgtaaattgtcgtcggttgtaaactttcgaggttggagatgaagctatacacggttggttccttgtcacatgtcaaaggtcaaccatggcatatattctctcccttcttaactaggtctgggcttgatattcgatctgcgggctaatactcacaagtagataaagggctctagacctcctagcgacatatgaatatccctttgttcagtaatcaaaattgcagatgcaacctcggcacctcggaccttccccacaagtaaagagatccgccgcgtgctgacatccgtttattatctgttcaaaaactcgagaatctgcttgactctgtattttccgaagcgatcaaggaagcgatcatactcatgttagtatatatggtccctattcgggttttatcttctttccttggaagttactgactccgcatcagattagataccccgacttaacaagatgcctttcaacacagccttgacgcgaaagctcggtattcgaggtgcgctatgaattcattattctgcaaatatcaccagctgctgatcacagatatagtgcccgtcgtgcagggtggtatgcaatgggttggatacgctgagctggcctcggctgttagcaacgctggcggacttggaattgtatgtttactcttcaatgaaagccctaatttaatacagtactaacaatacaatccagctcacagctctcacccaaccaacccccgaagacctccgcaaagaaatccgcagatgtcgcaccatgaccaaataccccttcggagtaaatctaaccctcctccccgccattgttccccccgattacagtgcctacgcccaagtaattatcgacgaaggagtcaagattgtcgagactgccggtaacaaccccggccccgtcatcacccagctgaaaaaggccggcatcatcgtcctacacaagtgcacgaccatccgccatgccaagtccgccgtcaagctcggcgtggactttctttctatcgacggctttgagtgtgccggccacgtcggtgagcacgacatcaccaattttatccttttgagccgtgcgcgccaggaactcaagattccgttcatcgcctctggtggattcgccgatggccagggtcttgctgctgccctggcgctcggcgctgagggtatcaacatgggtactcgctttatgagcactgttgaagccccaatccaccagaaggtcaaggaggctatcgtcgcggcacaggagactgatactgcgcttgtgctgcgtcggtggaagaatacctcccgcctgttcgctaacaaggtggctaaggatgcattgaagattgagcaggagagtaagactggcgagttcagcgaggttgggccctatgttagtggcaagcggggtcgtcaagtcttcattaacggtgacgttgatttcggcgtaagttaattgcaaaattatgtttcatgtgcattcgctgactctttcgttatacaggtgtggactgccggtcaggttattggcttgattcacgacatcccaacttgcgaggtcctgctcacccggatcgagaaggaggccgtggaggcgatgactcggaccaggtctttgtttatcgatgctccctccagcaagctttgaggggttttatgttacagatgtggtctcaggcgtatttagctttttattgtttagaaagatctaacagaatcattttgggattttggtgatggcccggctttgtacatttgcgttttgaatagtacttccaggctatcttcacttcacgctcgtcgatccacgtcatttccggcgctgaaataagagctacccactctccacaggggcttggtcaacggtcgcattcccgagcgagggtccgtgatattgcatcaaggatctgcaagcacgcagatccgcggacactcgggcattcctccaacgccaacctccaacaataatgatccaacgcgatagcgaagcttttgtccaagcctactagatgaaattgaaaaagaaagaatgatattttcttcaaagcccgcgtgtttccatgtgagatcaaaaaaagagtggagacatccttgcatgcagtcgatcctcgggggaatgcttgaatcttctacgtttccggctctgaccattggttctgtctcagttgtagcatcgatttctcgactatgcatgatatcattcatcatgagtggtccccttaccaccaacttacaccgtgatgcttagtattctcactgtagatcgtgctgtttagagcagggttagaatatctcgaagtaaacgtagctgtacttgaggttagtatacgcaatccaacagcccgagcaagttgatcaaatcccattgcgtttcacagcagccggtacaaaccagcattaccccgtgaggatctagatagtgacatacctcgtccaacgtgtctccagcccagaattgaacgcggccgaacttagcctcctcccggaattagttattcaattcatatatcccaaacccagcattctgacagctattccaatctctatcactatcaaaaccaataccaacttcacatctccaaccacatacctataccacagcacactcatcctcacacaaacaaatctctccaaaatgggcttcaaatccaccctggcacgctgcatgcgaaaggaccgtctctccaaaagactctcggcaacaagcaccaaggtccacgacgaagactcaaacgatctaatcaaaacaacctccgaaacagtctcgacccgcgcaagcatggagtccaccttaaccatggtgcaccactcgttccacgaaccagtcctgccaggcgagtcgccggcgaaccgcatgcagatcaggacagatagtgggaatatgcggacgttatttgatgaagacactacttccaaccaaccgacagaccgcgctaccaaggcgctgtctagacccgcatatccgattttgaaattggattgtcggtcgcctgtcgatgcaccgaggagggtgttgcaggagccttgggagatgtcaacagatgggaataggagcaaaaccccggtgattgctggttatcccggaaagggtgcttcgggcttttcgtctaagacaacggcccaggagggtctttcgcccactgagaaagttgtggccgagaagaaggataagaggtctatggcggctttgctgaaaagacattgtggattgaacatcccgcgctcgtcgatttcaattaaggcttcgcgcgatcttcagtcgccgaagtggttggattctgctggggttacggaggaggaggctttggtggataagcaggatgggaagtgggtggaggtggatttgcatgatgagaggaggaggaatagtgtctggggtggtgttgcgcttgggagactttggtaaaaagtagtggatcggaatgagtgttagttcttttgtacatagttggcacggtatttaattgaagtcaaaattgaacggttgtctctctgaacgaatggacatgatgatttgtaattaatttccatgttgataaatggattgaagacgaggcaacatgaaaaggaggtcatgaacaggaagtgaaaaaggatctagctatgccccagctggtttcgtcgagggggccgatgtaatggagtgcgaaggagcttaggatactggacgccgaaagcagacgagggagtctagtgaattaggagagaattgaccgatctgagaaaatggatgatgatgcaacgagtctaatgaattaaagtaatatatatggaaaagccctaaccgagacagaaactgggccgttccaatgcgcagggaacaagtaataagcagaaatcaaaacaatcttctttctccgagggtgccacacgacacaagttaaatgatacacgagatggttcaaaaggaatctaactaatcaattgaaagccaaaagcctacttcccatgcccgaaatcgataacagtccaaaccggcagtggtaccatactctgcaccaaggtccaaagagctggcgagattgccaatgctttttgcgtgatgagagaaaacacggcgagacgcttagaggatggagccaagggcaacacaggggaggccgagaccgatgaggtcggagttctgtaagatatgtcagttgtagtcgaaatagcgtggatgttggagcactaacggcgctggaaggagagttctggcagcaggcaatgttctgcttgcacttctggttgatgagatcctggatggggacaccaatgaggacggggatctggagatccagcttggagcactggtcgaagagaccgaggccagaagcaccggatccggagccgatcaggttgctgagggtaccaccgaggattccggagttgatgtcggtggtgtcaccggcgtagacagccttgttgcagcaagagagctgggcctggtcaccacacttggcctgagcctgcttgacagtcatgttgtcggggacagcgaagcgaacgtcggtgttgcccttgttgccgacaccgttgccggagccagcaccaccagcggaggcgcctccagggggaagagcgtagacagtggcagcgaggccgaggacaatggcggagagagagaactgcattgtgacggtggatttggatttgaacgagagaagactcggagagtgtagaagattgaagaatagaaggaaagagtgaaagagagtgtttgatgtggatgaagaaaaaacaaaacgagggcgatgaatcacctcatctttatagatttgaccggcggtctgtgagtcgccctgactccatactctagggccaaattgttttgtttcctgccaagatgatatccagtatgtccccggaatgttactggttaggaaggggagagggagatcgctccactccgcagggcttgcaggccaacgagggagctcctgtggaggctcctggtatggatctactgccaggttctcacttcacgcgactagggacatacctggcattcccttgccctcgctcacctgcctggccgaggggagtgtccacaaattgcctgtaatgtttggatgaaaacaggtgtaatccagatacagctatgctgtaccttctctaactacaaacatccatagcccgtaaacctaatcaaagtaagcttaagctcttcaagtgggtctaagggcgtccctggagacttcgatttcccagtacaggggcttttctccctttcattggacttgcactttagaagctaaggcatgtaacgtatacactaattactcatcgaaggcacctgactctactgagaaggctgggattcttcctctaagtggtcgaatctccgtaggaggatcatctgcaagggtgactgcaccccgggcactaaacctacgtagggagagaaccaagacactcccttcattgtttaatttcctttaaactacgaggaattgagcactgtaatggtaatcacgagccattcccgtgaagtctccgattgggatctcgctttcccccgagaataatggtgccgattgcgaccaagcttccccctggcggcttctcacagacatgaatcggtcttgtttgcatggtttgacctcacacatcttgtacccttcactagattcttagtcaagtaatctcttcccttagtctatctgtagtctgcattgctagtgtaccttacttctcaatttagtcccctgtcgcattttctaatcaagtcttcgatgacctcgagaatggccgggatcttgctagattcattcaaaatgcgtatcgcaatcttattgagagtaagtccgtcgatgaattgtatagtcacacttgaatgaggacgatatggagaatgtagtggaaaatgatgcctggcgtcctttgcgctgcccacagtattagatagtacgtcattctagtagagtatctggtagtcaatggcctaatggtcgctacttggggtaattccccaactagtaaagtgcaacgctgattgatagtcaaccggctgttctagtagtcttcacgtaatgaatataccacaatctcataataggttagataattctctctatgtctctaataatagtttggttgtgatcttcttattatacttcctgctgaagtagttggggtaggaaatatttgtttgaatgtagaggttctaaatatatatttcgtcggaggacaacgattccaagatacagcacacaatatgtatattgtagacctaactacataacaataaaaatagtgttttcagatatgcaattgctcaatggatttaactatatcatttaccaaatttcctaatagtaccttcatggtcgttcatggtgccaaccaaatggtcgaaatgtctctctcctaacgcctgccgcacctcccacgcgtgttcaattaaatctgaaaaaatacagagatttgacgaccatctctagcaaaaattcaaggtcgcgatcgatccgattgagtattttttttcagcgttgaccaggcattttcaatggggtataccctactatggctattaggaccagttcccattctacatcaactgatcggccgtgaataagcgaattatcttgcataaatgttccttcaagatattagtaaacgcgaggaattgcagcctctaaatctccaaaacatcgcaatacacggcttcaaatgagggtgtgagatccgctatctagggatgtacggagtaccagggtgcccgccgcttgctatggtcttataaaacatctatctatctaacgaaattccgtatttatatcaattcaaaatggaaataaatcaagggaacagatctgaaggcgcatctcctgaaaagacctccaaccccgaaacaaaatcattccatagcatcttcgaagtcatgggcgcattactatatggctggacaccagaagccctcaagagatcattcatccgaggaagtaagacatcgactgcctgcgcttccatttcgcgttgaatttctctgctgagtccaccttgttcaacgtaccacgctgagtcttccttcaaaaccacgctctcgtaaaggttaagcaagctcgggtcaacatttgcatctatagcagcttcataggccatcctgtgaccaatcgcctcaactaatggaagagcgagcgggaggatatctcgattgaaccgctcgcttcggtgaatccccttggcaccttgttgaaggagatccctcgcttcggagaacagggaggcctcatgccgagcaatggggctggtggaatcgttcggtggcggcatttgatatcgaccgagcaatagttccgacgcgagtcctgtgtttcacggttagtcttcctcgagaaatttcaagttccagacacgtacggatagcaaggacgcggatatcaccctctgcagtcgatgcgccgcgcatctccagctaggaaggagaatcagtcagctgtcaaaggagtaagtaatactaagatcttacctccatctgaaggagttgattatgctcataatgcccgtgccacccacaccgttcattcatagcggtgatgcttttgctgaaatgacccagtgctatcgccttgaaagctgtggctataccatggcgcactcgggggtcaacgctctgttctcggaacgctatcgctgcagaaactaggaatgcttctagcacactatactgggcgatagcatggaggatgggcatatgttgagtccggaaatcaatcactgccatcggggttccatcctggccactaacaagcctgttctggctgaaacaggcagcattgtaggcagcgagcttgagtgacggtatgacacacccggagaggaagagagtccccactgcaacgcggtgaatcgaggataagaactcttcgcgcttgtcttctgttccttcaacactaccaagtaaggcggattttggtaggcgaacgtggtcaaagtatgtgagagcatgatcgactggatgcgcaccagttcgtggaggcaaggccctttttaaagattagctcttatagttgaggtattggaaggcgcttgcggctcacttcgacataatacccttgcacatctcttttccgtttccaagctggactaggaatggccggattccagagtctttatctccactcacaagacgagccatcacaattgcaaccactggaataccgccccttggggtggttggcggcatgaccctgagactatctgttagacaatttcagaactgaatgcttatattctgcagcttactttgcatcgtttggggaaggagtatgaaggtcgatgtcaccatcaggcagaattgttgcggttgtctgtatattccgtgcatctaatccatgattcacttcggtcaacataaattgtgccctggatttcagccccgttaggtataaatatttgaagatttgcttatggatagacccacgagatatcgaaatccaaagcggattggaggatccgctggagctctggacgtttcaatgcaaaaggagccagcgtgcccacaaatagattgcactggatactaaggagggtgaaagctccaccgtcgagtgttagtagaggctctcggtgtagcttccagaatttaggagtgatgtataaaacatccttaagcgtcaggcctattacagttagtggttgcatatagtggcggaagataaatagggaataccatatgcattagcaaaagccttcgccctctggtaactcagtctggtagattcctctagactgagagagcgtggggctggcttgaagagttccgaacgtgctagatcctccatggctggatctacctgctgtagctgcagcagaaactgctgtaatccgttctccatagtgggcagttattctgtatgaagggtttgaatatattcactatcgaaaagggaacacttaggggtatataaaccacccgagagaaactactttatgcatttcagcagggttagccagcaatatcccgctttttttcgatagacctgatcggtgctgaaatttagaacacaagacatacgtattggcatagtggatcgacaaaaaagataatgccagtttctggttatagggtttagcgactcatcattcgatgctgccttcggcttttccttcctgtttatggaagccggaacagatcggtgtattcggatcaatatcacgatattatactgaatattaggaacatgtggattctgtcaaattcatggctagctgggtctccattttttattgactagggtggatccaaggtatagtttgtctcgcgtgaggatcgaatataagtggatttgctgaccgctagaacaaaaataggggtctagcctgttgatcgattaagttggtgagatcgatctaaatatcttaaaagtttcggatcttgaagcttgcattgatctatgttcgatagaacctcgaatccggagaagatcgagtgaatactaggtccaaatgcgttatcggctactccggagatttgtatgcaattatttcttttccatcgcatgtgtattgaggagccttatcattgtggaagaccgtgttctcgtatagagtacttttactttgtatgcgggctatgcatgcaagatccccactgctggagggaatatactcctcactatcttcctacactgagtactccttacatagcgccacgagacgaatcttcactgtatcttcctgtatgatcaatgcaagtgtagttcagcacagccagagagtcgatacatccacgatgactatattcaagcttatgctgcatactaaacaactcaaaccaataaatcaacccaaggtgcattagccatatcagcaagagtttactagacaaaattattagataccgaaaagatacagtggcaacttatattctatatcacaatgaaagaggttgcataagctcttgattagcccagctcataatcgaaagtacctgagactcttgctcaagcgcgccatccccgaggagaccgaccttattggatattttggacagatactgtagacgacaatcagcatagtgatgatgtagacagatgacacaatgcagcacttcgatgccgggaatcttgccctggcttagtggaaagtttggccatctacatgatcttaccgatattttggcgtagaattacctcgacgagctcgtatggtactcctttgagttcggcctcgaacacattagttagtttcctaatatcgggctgtgatcagattgacggcaagatgtgctaagcatataggggtagttagttatacaaagatcaaggcgttgatattatatattagtgattgactttcaattacgtccaaatcatatttttcaagaataaacgagtcgtatatattattcccagaaaaaaacaagtttgatcagatcgagccctagtccgcattgctttgcattcaatacatgcaatggaacaaatgacgatcagacaaaatgaattaaaaatctgtttctcagaaattgaacaagaagattattagatgaaaagcgccaaaagggaaataccaaaagcccagagactacacaagggtagtttcgatccaacatttccgtaagcgacagtttcagttggctcggatcctgaaggcttggagacagtgatcccaggggcagttggcggaagagaagaggtgggcttgcagctagttgtcatcttcgaagaggacgcgtgcgcatagtgatgggtcttggaaggagtactggtcgtagtaacaaccaccagattcacagatgttgttgaggaacaagtgaccgtgctgaactcaacgagcggcacagttgctgtgtgcgaggcccagctgatggtggtacagggagcctgagggacagtcgtggctacagtctcaacaaaggtacgtgtgttgccagtgatgtgagggccagcagtggtcttgggaacgaggggagaagtgcaggttgtagcaatgtctacaatagcagggttctccgggacgaagggggcgcaaataccagcgaagtaagcaagggcggaatcttcctccgtctgggaggtgctccaggcccgaatgcacccgctaactttgtccgtaaactcggtggatgggcagaagcatcccacatcgctgttggagtcacacttaggaatagagagccatgtgttgagacacttggggaccacgttggggcaaggggcagtaacagcgggcgggctgggcgcgattggggttggggtactaatgggagtagtgtgcgaatggacgaaatgagatgttgtgcagcttgtgctaggggtttgcacgggcgtagacgaggtgcaacttgtgctagtggacgtttgcacgggcgtagatgaggcgcaacttgtgctagaaaacgtttgcacgggcgtagacgagcagggcgtgcttgacagtggatgtgtagaggtagtaagaacgcttgaactagggcattcagttgcagttgatgcccatttagtgacgatgatctcctcagtagtccagactgtggaagtcgtcatatggtgccaagaatgactagtcgtaggaacatccggcacagacgaggtccaatggaaaggaggcaaggaagtagtcgacttcggggggtccgaaggaaccgtctgcacgggcgtagatgggcagactgtggttgacagtggatatgtagatgtaatcaaaacagttgaatgagcaggacagttagtcacggttggtgggcattgggtgatggtgatctcctcggtagtccagaccgtggaagtcgtccaatgctggaaagagctgctagtcgtaggaacctgcggcacggatgaggtccaatggaaaggaggcaaagaaacagtcgagctcggactaggctcagagtgatagtgagagtgagagtgagggggttcaatgacaggaactggtggcttggacccagtagagcagtcaaagtcgattgaatggatctcgagatcacaatcaccaaacttgctctcttcaggaagcgtgaactcgactgaaacagcaccgccacactggtcattgccaacatcggttcccttgtacgagctcgaagtgacatggtgacaggaagaaccatcgggcatctcatagatgatgaagatatcagtgttccgggaagttgaaagatggaagtttcggattgagaatggagcgtcggcggcggaaatcttgattgtccagtcatcatcacgagaaagctttcccccaaggcaagtacccttaaagtagttagaatcaatagcattttacatatccaagagcgacctaccccgtaactagatccatgacagccattcttgggctcgaggccaacgaagtggaagccttcaaagctccaattgtcaccgtttgccaactcagacaagtcgaagcctttctgctgaacatcggagcactgattgtcggtgttctctggactggtgtagcagacatcggtaccccaccactaagatatccaaagtcagatttgtattcggagttgtagaatggaaatactcacaaggccagccggatgagctagtgcagcgctaaaaagcgaaagaagagcaattcccttcataatgggcaaagctatattagttcaagctagtaattaaaataatataataaaatgagtgaatgacgcgagttgggcgtgggtgtaaaaagaacgtggcgaggtttgtcgactggatgttggatggagagcttccaagagtgccaggacatggtcctttttaacctcaaataagatattcggacgaactactcctactcgggctctactgtcaacaaaatcagaaagtagaaaggaatgtcagccacaacagcataggaattccccatcgatccaatggtgagaactcatactcgtgaagcagctggattcactgaaatcagggatctcacatcgctgtagttcagggaatcaatgcagggggaacattccagtgctagaagccccgaaagccaatcagagcagtcggtaactattcccgagctatagggctcgctcaaaatctcccgcaagcccaaagggttgggaattatgcaaggagctacacctctcgatttatttagcagtttggaaagacatgttcaggttataccaatttgtatcctacagtctctaaacactttcctagttatgaatgactctattagtaccgttgtaggtttgtgacgtgtattcggtttcaactgaaaatgttcaattttccttcatactccctagatatatcaaagcctgtatctatagttcgattgtggtatctgcaatccacgaggcgttgaaatacgtggaagagatctaaaacagggcaaactaaatatacattcctgctcgcgcattccaccagaaagttgcctagcaagtaatcgtttcattttctcttgataattgtgttatatcaaataaagcttgggcaaagcccacacataaatctgttgttgactattcgtatgtccgcgggaagctccaaagggaacttatatcgagtggagaagatagcgcaccacgggtagcaggatatttccatgttcgaagagcatgctcctgagatcgtgctgctgagatgattgtctgagtgccagtcctgcagtccgcattgtatctcgaagccaatcagtagcaaatccgaaatctagaaatcagtccgttgaagaacacggaaagctgaactgcgaagtatttcagcattgtaatgatctaagcttcatctgaaagaaaagcgatccattcaatcaagttaaatacagcgccgtcgtggaggatgtaggtgcagtcctcgactcgacttagacgctaatccaattcgggattagcgtataaatcgaatcatttaggcaggcggtgactcttaaatgaacgcacggaccctctatttcgactgggtagatcgcatccaccgatctctttctcttttgtcaattgtttatctgactgcaagtatcgttccttttattgctcagcatgtctgactcgccagaagtttccaaacctgttccacaggagcgcgccagtagctcgcccatccctgcttcgtcgggccttgagacggaagccaagcatgacatcgacagccagaaagaccaggcggaaaagaatgacccccaacccaccgaagaactggagatccccgcatccaagtcgcaacccgatgaaccagagcaagatgaagtgacatctgcaccaccactccccgacgaagtcccacctccacttcccgccgaggctccgcctgcgaaggccgaggacgatggatgggaacctgcatgggacgccactgcaggggcatattacttttacaaccgcttcactagagtctcccagtgggaaaaccctcgcgtgccacaggtcccaggagtcccggaaatttcagcagcacccggcacagaagacgcagcccccaaaaaagagccaatacttggtggctacaatcccgccatccacggcaattacgaccccaccgcatcgtacgcgcagtaccacgaagagccagcacagcccacgaacgcagccggattcgaaccctccgcagcatatgcagctaccggcacatttaaccgcttcactggacgatggcaagctgcaacaatcaatccggagaatcataatgatgagaacaagtctcgcagacagatgaacgctttcttcgacgttgatgccgcggcaaatagccatgacggccggagtttgcgcgccgagcgcagtgcaaggaagctaacaaagcaagagttgaagcagttcaaggagaagcgtcgtgaaaagaaggaggagaagaggcgggcttggctcagggattaatggtgtgtagctatgtttaagttctgggaggaagggagggttattcgatgtattctctcgttgccaccggtcgcattgcaatttcggagctttttgataccatctcaccggatgtgagagccggcgtttgagcttgtttgattctttttttctcggcgttttgcatgtggatagaggcagacagacttcctgtcgtctatccacgattgagcaaagttatttgtacagcgtaccatgtatcaacacaaacaatgtctcataatgaggctctcctagtaatttagattcgtattatacgacacgttgcgactagcgtccacgttaattcaacgacttctattgtaccgttcactgatagcccactatcagtcacatgacccgcgatatcaaattattttttgcggcgatcgcttcatttgttgccggatactctacgctagaaagcaaagaactgaaagcaaaggtaagattgaatgtattccctgttgattgactggaaaaataccctcaacaccgactttcattttgtggctggaacttagccttcacattgaaacgcttatcaacgacctgattgcatggatatatcgcgggggaggatgcgtactatgcaaaatccccaattccaagagtcctttatgattctagatatcctaccctcgctttccttgctcattgtcctgtcatcttccgtgaatatcgacttattactgacgccttactccagctatatcaaataaagtgggatatcaagaacaaccccaccaaaaagaaagagaaaaaaaaaaacataataccaaaatcctggttcatcacacatcatgtccgcctccacgacatcacaggcaaagccttcagtgccaatcgcactctctgccgaggcagtcgacgacctgatctatgacgcccgagccggcgacctcgaggccctaaatgaggacatcgccaatctagccagccaacacagctgcaacgagtcacagatcgtggcatccgccatagacatggcagatgagagtgagggcggctctggatcctgcattctgcacttccccgctgcgaatggaaactccggtatgtcatttcaacgacttgacctgacttgcttgtttactaacaccgctcagaaatcctcaaaactctgctccaaaagctgtcatctgcagacgcagcgcagcgtgtcgcgttcgttaaccaccgcaacaactctggcaacacgcctcttcactgggctgcgctcaacgcgcacctggaatgtgtcaaggcacttgtagaagccggcgccgaccttgaggtcaagaacgatgctggtcacgatgctgtgttcctcgctgagcggacggcgtgggctactgttgaaggtgatgaggaagccgagggtgctgagggcgatgatgctcaggttcaggagattgagatgactattggtgagaatgaggatgaggagaagcctgctgagggcgctggtgaggtatctgccggcagacaggttgttgagtggctcctggcttcggatggtggcgctaatttggagaagggggctactcagggtgaggctagtggatctgcttgatttatgttcgaggaggtcggaatgacattggttctttttgggcgggattggaaatgattgaagaaaagtttaagatttcacgcatgcaatcggtgatatgggtactttctattcttgcatatgttgtttgttcgtgtctatattaatgcattttgattatttctatcataatagtacaccgaaagatgctgcagggcttttagaatgctgccctagtatacagaatgttcatatcctctcatttacatatcagttcaatcactgcgaacttttcccgtcaccgagccggtgcaagacgagacccccataggtagcggagtagcgggatcgatctcccgaacttttgcatcgaagccgaccttgaagcgccggtctcgccagacgactgtcacaccgccatacaccgccatgatccagataggcagggccagcaattcgcggccgagccaggcggcgagccattgcatgaacggacgacgagtaatatgggatgatcgggagcgttgaggccgagcgaaatctggggtatcctcatccaactcgatgcattttgcggaatgcagcatgatatatagtgtccaatcgaccaggatccagaagactatgccaagtgcgaacaaaacaaaaaacgcacgccacgtcccgagacgggcagcaaattgcacgccattccgctcgagatacggcgccaaggcagtggtgatgccccaggcaccatagagtgtgcataggaatgactcagtgcctggttcgacaagcgtagcgagaagaacggtaaatttacggactcgcagccaccggacacgccgggcgatgtatgccggcacgctcatgttggcaacaggctgaatagccatgtcaccaaagaccatggcatgcttgccccaacgctcgcggagctctttctcttcccgcacctgcttcttccacagtagatcaccaatcagatggtcctcacagatattgtcggagaagaaatcgatgccaggatggcgagcttgggaacccgacaccgaatgactggtgagatagtcaaggtgggagcggcggaacatgttagatttccccacgatgcacggcgcaacaagtaccgtattgatcgcggtgtacattttggcgtgcgcggaggacaggaacagctcttctaaacgaccgcctccagtcgcgatcatggctgaaggcccatcctctggacggacggacggcatcgctgcggccgctgtatcagcatccgtggcttctgggttggcatctaggagcgcctgccgctcctcacgcaggttgctatctcctgtaacatccactgccacaggtagatggtgcacaaacttgtatttcttgctcgatgagggtccagtcccgcacagcctgtctaccatccgggcacagactcccttcccgacccagacattgcagtcaattatccagacgatatctcctttcgcttctctgtatgcgcggctcatatttcggatcttgggattcggtccgagcgtgtacgtattgatgccatcctgctgcaagaggggatcctcgtcttcgacgaaaatttgcgcgtccacatgcgggaagtcgttaattagtttgcggagggtaggataggctgggtctgcacgcgtcgccacgcagagacgaatgctgagcttgtcgcgcgggtaggactgtcggaaggtggcagcaaggcagtcatagaggtgcggctcaaggcctttgacgggccggatggcggtgacgtgcggtacatcggaggcggaggcgtttgttagccgtgaccgataaggctggctgaggaaatatttccatctgagcagaaagggattgcgttaggacatggtagctcaaaaatagcaggccaaatcgtacatctgaaaatatcctaggctgcacaccgccagtatgaatgcataccaaatcagggcaatccagccgattgcgacggacgcgtacagcgcgccatcgtcagacctgcgagcgaggaacgaaaagataggctttagcatgggacacgaagggaaagcgacatggaagcagacgaaaaggacattttggaggagaaaagaagcaattggatcgggtggattctcatttcggcagttagctgtctccgccctcacagtcaggtacacggccaaccagaggacatctcgttccactagtatacggagtcaatatcaaaatagcttgtctgttcggaacccccggatgtaagaaaacgtacttctacagttgaattggggcaattcggcaattggttgctattagattattttcgaatgtcattatgaagacaaaaagatccatttccccccaaactccaaggcctattccatgataccagacgcaatgcaaattcccctttaatcaagtttttttcttcttccggaccaagctcgcattcagcacgttgacactagtcggctctgatggagtaggttgcgtgtctcccgatccactcggtgtttgggcattcacagcgggcatgttgtcctcgcccaatgacttctttcgcttgcggatcaatccgagatcaaggacattgttggcggtggtattggcaggctgagtagtgctgctcgtggtgttggtgccgacaaccttcttgccccacgtaagctcatccgcgagagaggaaacttggtcgacgtagagtttggtactggcgatgacttctttctcatcatagaaatggtcgagaaccgaatccatcatcgttttgtagtccggttcgctgagaacgacttgtccgcgtccggcctccggccagtcgaaagggttgacagtgttagatccatcatcccggggaagttttggggaggtatctgtggtcgtcaacgtggcaatttcttcggactggctcgagccattctccactttcagctcgcccgaaatggtggagttgtcagaggaaccgcgtgtctgactttccattgacgtcgagttcatcagaccaggaggattgatcactagccacaggaagccaactaaccgaccagcagaacattcctggcggaaggacatcatctcccagaattggtccaaggaccgtacactgcgccagcgtccagcattgggggcgacaggctcaccttccttcgattcaggaagttcactgtccaggtcgacgaggaaacgagtcttgggatcgtcggggaaacgaggcactaagcagcggggaggagccgaagggtcgtggtacaattgcttcagtgggtagctgttgagccaccgtgggcgatcctgtgcatcggtcttggccgtaggcggaaagaaattgcgcgtttcaaagcggtcgcagcttggaacgatcaagtatgcggtggcagaggccttggcagcttcgactgtttgatccagcgctttcgtctcttgaagagcagactctggctcgtgctcgcgtaaaatcggatcgagaacacaacaccaccacttgattaagcctcgatcgtccagaacatgcttttcggcgttctcaatactgcccgggaataggtactgattctgggcgcgggcgaacagcgacacgaccaggcgtacaccgggccgctggcgggttcgcgccagaaatgagagaaatgtatttgagaccaatctcagaacagagaccttgcgcggtaattttaggagatgcaggagaccagtcgagtcggctttggagatgaagatggtggtcaagtgggccgtgttgtagaccatcacctccattccgaagataattgtttcaccgtcatcattggcgtcaattgacacggagaggaaatgattttcgcagaatgtcggctcggagacctggcccggcgcagctgcaaagagagcctcgcagggagtaggagttgaggagacatggcgaacggtgatctcaacccccgtggggagtgccttggccaagagatctgccagatctaccgccattattgttcgtccaattagagtcgtggaaaaggtgaagagaggagctgaagacggagctcgatttcacacccttgaagatcacgtgccaggaacatatttgtaccgccagtccaagggggtcgatatacagacatttggacatctttgatgcggtagtccaattgcgtaggtggtgatgaggcagtgaagactttagcaatgggattgaggctaggtagatgaccttaatgaaagaatgtggcgaaaggcttattgcatagactataacgcttggtgccgagcatgctatactacgatgaatgaatatgcgatatttgacgcgttaacgcttgtgctctcaccagctcttgcacattcactcgctcttgccctttcaccaaccttttccacgcttattctctcaaccacaactcaaatctcactcaatccaaactctgctactcgtggacacaagcagaatcaaacataccattgaaggtaagcaagactaatcagattaatctttcattgagcggaccaattgtactaatatgtcatcgaacatgagaagcccggcttcaagtgtaacagagccgcaacccggtcacaccgagagtacttatcaagatgtcttacaacccccccggggacttcataggtaagtctatacttgtgtcacctcactataatcagaatagccactaatcatgcatcctagtgcccgacatcaacacacaggaagtctgcactcagttgcagatccgttacgcctgcggtcactcgacaggcggcgagttcgttaaatgcccacggcacgtcaaaaaagaggacgaacgctgcaccagccgtcaaatcaaccatgtagatgtcaagaattcgtcgcacaagtgtcgcctatgcctgcgaagtgaatgagatatggtatggtatccaatcggcgggagttgatggtgagctttatcttgagatcgtcggaagggcgaagacgagggttatggcatatgaatatcacattgacaaaggagccgatactgtctatcttttaatcaaggagaatccggaaagaatccgactagggttattaacataaatccctgtaaaaagccacacacggggcattgatgtaatggtacataagtgatagtaggaccttggtaccatagttgggccggatgccacttaaaagtaagaagccacagcatctagatcatcggcattgagtagaatgactccttctctcaaaagagtcctccagacaaggtttcgtgcacgaatcgggaagtgtggcgtgttccaatatctagccccaataccgcgctcatttgcggtggaaatttggtcccggagagctttgagttggtcgtctgagagaattggatctgtatcgacagttatcttgccgacggcttcccggaaattcgtcgaagcaacaggcgagataacgccagttatatcggcatatttgggatcattgagatctgccagcggcgcatcgaagaagtagtctcggtctttgatgggcgctaccatatcgaacggtgtctctccggtgccaatgatggtgacgggtccattggtaacggttttgccatccttgacggtagttaagtagcccttctctcttagaggctctaaagcggcaattaccgcctggaacgtctcggggccggatgttttcacatcaatgaagaagtaaagcgtttggtcgggaacggtatcccacacaccgctgtttcaagaaagcattagcagtgagaccatatcgggtcctggccagatactcactttttagttggcgatgatataaatggactctcggggttctggcgctctagcacgtctaaaattgggttgatatacaaggattcaagagttcgagactccgtcagggcggattcatcgtggccaaccttgtctaattagcatgctacccagaagagcgcgcaaggcatcatcggttaattaagctcacatagagggtgccattgtataaccagacatcggcttcggtagatgtgcagccatgtgagagacctgggcatggtaatgttagggataatcagttagatagtagagctctgcataccggtatagaaaggctcgtctcgccaatagtcactttgggataatcagcggatgaacaagtttggagtgaccatgagaagtgtccttacttatgagaatgaacaggaatctagagattcgttgcatccagggttaacaatattccagatggcggaaaccccacagagtttatcgatacatggtgccacagatagactcacgggtaatagatctcttgttagatcagtgggatacctatagtctgggctgccatgggtgttttttaagatgctctgtaggctagaggtgatcgccccgagagctggatccggacccgcgaggagagccacagcaacgctagagaggaataacatgaaggcagagggcatttaatgacaagatcacccgaataattgacccgcctttatatatcgagctggagttgaaagaaggtggaattcaattgactgaattggagaggcaaattgcgatgacgatcggaacccggactcacgtgtttccacaaggggtatccataacatcgaggtcgaacattttccaagttagtatagaatgaatcgagttgatcatttgaaactgattatatctatcatgtggtcgctctctcgactcttagaaaaagaacagccaaagggcaatcaaagtgcgacaccaattaagagctgatcgcactggtcatttacttgagagactacaagaaaccgagaatagtaatgtatggtatttggcatgaatggcagacatggatttaagaaggtgctaaaaacatgaaaatcgcaagaccagcaccgtcgtcatggaacttgaaggcggaagacagcgagattgtagaagaaaaggtctgattatgaaagagacccatacgtcacggaaatattgccttaaacctcccgcacacttggcgaagaggcagctccagagtcttgtgagttccgaccccgaaggctgaggtttccgatacgttggaccaggttgctgcccacagcatcaactgcacccttgggcgcaagcaaagtcgggccttgagcggcagcttcttggactctgaagagtttaatggctgtgccgttccaaacaccaactgttcctggagttgcaccagaagcggaacccactaccatctcgctggagaagatgaagccccacagcaacgattcgtaccagcccatggaaagtgcggaccactcgaatgattgcacgcgaaccggcgttggttcggagattatacttgtaaccccaggctcttcagcaaatgatggaagattgtggattagtgtacgggcctccggactagcagcgctggcaagcgctgcatcgggtatatgaggtgcaatggctgagattatggtaaggattgtatgcaatggaagctctggcaaccaagactcgagctggcaaatattgttagtagcgaaacatttattggaaaaacggttcggtctgcatagacttacccatgggacggttggtgtgaagccactaggagagggtgtgaataaagcagacatgcttgtttgactggtcatgctgttctgccgggagaatggaggatgtccagctggtttctttcctcgtgccttttcggacattcctcgcacctgctgcactccgttctcatcaatggtggatgccatggagggtctccgtgaggtatgagttgagaatgatgattgagacggagtctgtgccccatcttcacgttcatcatcggagtcatcatcgccaattgcaaatgggctgttttcttcggggatcctagtcaacggcgacctggcacccgaaggagtatgtagatcatcctctgactgcgaaaatgtagggctaatagcgacatctgaagaactgctagctttcttcttctcattctgccgctcgatctcttgttggccactctcgagagtgaaagcccgcacggcctcaaagcgttgcttgtacttcagtatcgagtagacaaggtatgagttgtctagataaagtcagaagctatgaccgaaagagaagatctgggtagggtaattaccgatgaacttgtgctcgaggatgatgttaatgaagtcaagcaacgatgcaagaagagtatgattggattcgttcgccaacaagaagctgggcgcggacatagaagagaaaagctgaatgacctttgagcaggcgctgggagaaatatgttcgatatagggagcgatgttgttgaggatgatcagaagtggaggatacacagtgtctaggttccccttgctggttgtcatcaacgtgtgaattgactgtgctggttagtatggtattatttagatggaacaaaagacaaaccataatcagatagtcggcataagatccccggaacttgagcagtcggatcgattgtggtaaggtctcttgagcttcgaaactgttgttcaggctcttcgcaaatgtcgactccgcactcattgtctgaaggatgaaaacgcacatccggaccactccttgtttggaaggatccattctatattccatcgcatagaagatacatagaacaaggaagtcatgggagcgattagagtcgatgataaatgaccggaaccttttgttgcattgcaaggtctcccagaaaaggaccaacatctcaggggcccattttaccgatttttgactcccaggaagatacgaagcggtagcttgcatctagttcgatcagttagcataacttcttaatacacgagtaagcagagaataaataccggctggttcagaattctcgtcatgccatccaccaggaactggaagtcttgaggtctatgtagcctgccgaagtaatggcgataataattcttcggtggtgttccacggccatcttctggaataggatacatcaaaaggacaagaagaagttgcacgcaataaatcaccaaaatctgcctgggatctttccaaacaacgtggtcatatgggactctccacgacgcggggttatacttcatggcctgttttggattagcatagctccaccgccgattgagcaaaacataacatactgtgttgagaagagagcaaaggagggtcaagacagcctgcttatcttggcatgttgtgatataagtgattgccttgacaccctgaacgggcaatgtatctataccagtcagtaaaagttagagtaccttggttgtatcagactatgaactcactagacggcaaatacatggcctttccagtcagagtaagcataagccgcagaatctcgcatcggttgctctccaatgttttgttagaccccatagccgtgttacagccgacaccactctgccaaattgaaaaagagaccttgctctttgcagttggaagtcgtgggattgtgaagtcagcaaagaagagcaagtccatcaatgtgtctatcaactcctcagcaagaggcttcaaatcttcgtaatcctccgcacgcggtgatgtcgcctcttggttaccctccgattgtgcttcgtcgaagagtacctccccagcaatctgtgattgtcttgtccttctccttctccgtgtccagaatacattatcatccgattcctccagatgctccgcctcgtaaacataggggaggagacgagtgaggatccgaatgcagttgaggacctcacgctcgggggcaagatcggggtcggggaatgagggatggtttctcaatacagtcagtcgtgatgcgactgctagtatgagtgttttgaagttgggcaaggcatgatcgcgtgtgcgtcgtatgtcagccggtgtgaaaaggctaaagacatcttcggttgattcaggaagttcccagaactgccaccgtggttagcctccaagtctccaggacatacagtcaatatgtatcagaacgtactcgggtccagtaggggtcgtctgcggggatctcctgttcctcggagaggcggaagataccctgtttgaagacaagcttggactccgaagctcccatagcaaaaggaaagagctagtagtcacgccgttctcggtttcatgcggattttcacagcaaatttcgaagtgtaagtgatgcgagggcgctttctgcctgtttatttgccgagtgctagaagtggttggcggtcctaatcgtccgggcgcgggatcttggcttgaacacggggtatggcagatagaccgaatgccaacagtacggtttacagtagacggtactccgtacatatgatgagacatcacagcagaatgatacctcatcttatatacatctccttatcctattctgacctatttgttgccatgtatcaaaaggcacttttagcatccatagggaggacggaaaaaatatccaacagccaccggtttcggtttctatgaacaacacgaatgtacgtcaaatgaaacgagcctgtaataataagcgcgaattggtatccttgaaatacattacgaatgaagcaaccgctatgacattgaacacgttaaacaccaaaaccatgaatgacccaagtgcccgttcgcaagtttgtccagaaagctggaaagaatcagggggctcccccgctagccgaaagccggcggctcctctcatatagccacttgttcttgacccccagacttcctcgttttcccataagcggggaaggtgtgcctgggcccatgctcatggtcgactctccaaaggagttacttcgagtcagaggggacgaggatccaaagctctggcgttgaatagattctctgcctccattcgacatcgctttgtaaagcagggggctggatacaggcgagaagggtgtgctgatggaagagcgacgctcagaaaagcttgcattcgcggaaattggggagggctgtctgctagcaggactggccttgcgtgaagaaagccggtatctgggtggggtaacaaatactgttccaggcgttgctggtggtgtggcagcaggatccaaaccaagaagtgagcgctgggtgggggtaaggggaatgtcggagaggtcgtccgttggccggaagaggggagagagggccactataacattgaaaacgaagaagagttggagaatgaataacgggatttcttgatagatatggttggtatcgagtatttggcgtaagcttaaataagaccgttagcacgcgacgcgacggatcagagttcttatcgcactcactagcttttgaaggtagatccaaatgtccagctcagtatcaaagctgcgccgttccaaacgagcttcttcacatttttctgatcaaatgtagctgcattttgccgccgaacgatctcttccagttgagggtgtcgccattttccaggggtcagggtaccctctggagtgggaggaggcagcggaggtgtcgctttcggggtggaaggaagaaattgagtggccattgctaccgtggtgaagatgatgtcgagagtgcagagtgaggtgaacttgactggagactaggatcgtgaaatcagctactgatccgtagatgcgtagactgtttttttgcgaggtctttttgacaagagggattggactcactgatattatgaactagtttagtacttacctagaagggagcaaacacaagcagctgtcagttagtagtgcacgtagcaatgaacaattcttctttcaaaaagtcattattgttgttgtttggctataaattgacgatcccaaagtggctgcgctcggcgctcaaggaaggggttgcacgggcataagttgacccggccaagctgacacaccttatcgccgtgcccctcaacgtcataactaactagttgctgactgttgacacttcttcatcttctgctccccatattgaccaactaaaatggctgatacttcacttgtggagaagctggataccttggtggccgatgttctcgccgactggaatatctacactaccattgtcgccgggattgtcctcgcttttgcggtttactctgtcgtctcgtctcgggatccagatgtgcatccgttcttacttgctcgccaatcgacagcagccccaatccgcaagcagggtgaatctgctacttataggtgcctagaaaccccatatggcttacctcttcgcttcggactaaacgtcaaggacccgggcgccccgaaatggaccggcggtcgaagaggagacctacgtgatatttggaagactgctgtgcgtggagctatgaatgaggacggtactctttcgggaaatcaaggcaagatttacacggtcttgggtcgaaaggccgtcgagcactctttggacgaggtgacgcaagaaatcaatgtcatcggtcatcatctccaaacttccggcgcgaaaacggtggctgtttgccttacagactctatcgagcttttagctacaatctttggtgcgtgccttatcatcctaggtgtgagtctcgatgtctaaccttgcgcaatataggtggtgcattctatggatacgagacggtcattgtgccgcacaaccttccagccgagacattatcagcacatcttcaacaggtaaaagcggatgtccttattgctgaagccggatctctggacctttctctcgtcgccaagggtaacaatcaattgacgctcgtcctttgggttgccaagtatggcaatcaacacatggactggaacgcactccccgagaacgtcgaagatactctgaaggttgcagtttggcatgaactggtcgaggagttcaaagaaatcgctagctatgatgtgcctcagtacgacccaaagacagcaacccctgccgtccacactgtttggccgtcttcctcacaatccggccaatttatcgatttccagccagaggtaagaccagctcaacttgtcaacttgtctgatatcactttcactgacattcaactagaacttggtgtctgccatcggagcattaacctccgccctccctcgtactcagcgtttcaacccaaccgacattgttcttcctatcgactctctttctcgcacctaccctctctgcatgactatggctgcactgtttgccaactcatccatcgccctgaactctgttgctggagaggatgtcgatttcgctttggctacagctggggtgtctcccacagtcattattgcctcatctcaaaccatggctgagtaccacgacaatatcatgcgcccgcacactggtatcatttcctctcttggacgctggcttcaggcacggactttagatgcaggaaacatgccgacgcgcaacgttttcagccaattggctcgtgtcagtccgacatctgagctttcgctagatgaattgcgcttgctttgcatctcccaccgtatcgatggcgaccctgccgtccatcttacctctgaacaattgaccgaccttagaatcttcaccggggctcggcttgtgtatgccttgaccggccccggtgttgctggtgcgattgcgcaaacaaacgcctttgattatagatgcctccccggtcctagccactttggcgccccgctgagtagcactgagattactctgaccaatatccctgaagactccccttacggcacagaagagggacaggtacgtcgagtccaattccgccactttcatatagaactaacattcacgtctagatcaccgtctctggccctgctgttgtcggtggcaccgtcactcttcctgaacgaggccatatcagcaaggacaataccttggaattgtcttcctgagcgtatcaatcccaaaatagcattctttatagcgtacttgaaacttgaactgccgggacatttggtaatgagtttgtgtatatttcatcaataaatttccaactatatgtataaatgtttggctgctagttgagcctttagtagtctatttagatgtcttctcggatgacacggctgtcctacgcattgcttttatcagattgctggtgacatgataaagattacttggaagagtatgttctgatgacaacccttaaagactctcaccgtccaatatgagctctccatgcatcagaacgcatttcttgtatgggattcatatctaactcggacagcgaatgtcattccttgttcagggcagaaatcgaagtcagtatccaacaagtggttgagaacagaaagaagctgtcggttgtcggattaagcgttgaagagtcgggcagcggcgagtgttttgaggcataggcgctagaatagaaaagctcaaagttgtttgatatcgcaatttataaacacagatgaagtacaaaggtagtaatacagccacatgtatgcaaatgagggtcacgccggacgccctctaactcaatcactgccggcgattgccgccacccaagaaagccttcttctggcgaacatagttggccacaacattctccacgctgcgacggtcgtgcttgcggtctctcaagaagtacaatctcgcccttctgcgcttcttctccgatcgctggacaatctccacgctgttcacgttgggactgaagaccttgatggacatctcaacagcgacacgagtaagctcgtttcgcagaaggaatgacgtttcaattccgcgcaacttgatgctcagaacaattccgttgaatgggtcgccgttcttgaatgtcactcgtacgatatcgcccgtcttgacactgcgcgggtttcgtcggtagtcgaacatggccttgcgctcaccggtaggatcgaggactgccaattgcgattcggtaactgctgcaatggggtctttgcatgctttgcgagcagatggcggagcagggtagatcttgaggggctcacgctctacatgagatagcgaccattagtacagctcgcgtcgttgcactcgattggaaaggacctaccaggatccggacgaaagcgaagaggtatttgggataggaattgctcaggcatgtttgggggaagaggtacccgttcgggcctcttcgaataggccgttgaaatgaatcgacggttgatgaagggttggacaggctccgaggcccgtagcaaggaccttaagcagcccagcgggcgcattgctggtagagccgccatggttgtgatgaggatgtcaagtcaagaaagtcggagtcgagttttggccggatcggcagaatttccgccaagccttcgattgcccgttcgggttgcagataacagcgattcttttttctcctccgattctacgataccgatccacctcgttttcttgttcttactttgagggaaatttatcattctatcagctactactctcataccctgcatagcttcatatatagcctctgatcacacatgatggcgcaaatcgccatgagcaggctcttccgccaaagcaccaccggctcggtgcgccagtctattctgagaccgatgcaggcccgcagctatggttcgaactcaggtatgtattaataaccgatctatcgtgttgtcaaattctcatcggaggcgttcggaacagtaatcccaaccttcacctcaacatcctcccccgagttagacgaagccctggagcggttccgcaatgaactcttcatacccctcgctcttcccaagcgacagagaaagagcgtgttcagagagaaatacgccaaacaattggaaaacgagccgattaccgtgaagattggcgagaccgaagagttcaccctaacgcccaagaagcaccacgatctgccatcgaagaaagacgctctcgaggttctcaagttaatggttgcgaccaagaactacagcaaccttttcccgtacctcagtggactccggatgtcaaactatgccatcaacagcgaccggtgggagttcatcattcgcaaaaccagcgcggctagcaagctttcaaccattatcgagtgtgccaagcagtcccatcgcaccggcttgactctcagcaacaggaacattgctcgccgtctgttctttgagcttcacaagacagcggcgaaagcgaatttcgagggagccccaaccgtcaaggctctgaaattggcgagggaggcagctagcctgatggatgctgatgaacactccgttcggaaccttgaggatgaccccaaacaccagcctttcgtcatcggcacgcttttggagctcagtgccgcctgtgcgaaaatcgatgagacccagataggcttagtccgtagctactctcagaagcttgatgcggcctggtcccgaggaaatttccaggacgacgcgtccactggctttgagaacatcgaaagagtcgaggagaaccttgccgtttacaacggcatgcgtttggccctcgagttgcccagggcatcacatgacactgggaatttccaggctcgctgtgataagcttaagcctatcctgatttcgcagttggagaaagtcaagaacgccgatgtgcttgcagacaatgtggttaaacaattgcttgcggacaagcccaaacaaaagatcgagacgaacgcttgagctatgttgtgattccttttggtgttgattgagccacatcggcgtgtataatactgtacttcccagatatttttgagctggctgtgtatttcacaaaaagatatcttatttctgccacatctgatcctgcaaggtgctatttcctgtcagtctcttccaatgaccgtgaacgaaacattttggtcgtagtgtgcagacataataaactagatgatcctcacaaatgcataccagatcggtcatatcagatttatcttacggtttcttccgagtgggaagtgcgagtaaagcgtcggttagggccacaaggtcacatgcatggtgctatatactactatatactacgcctccctcagctttcgataattcaacccacgtaaggtaggtctgcaggcagagatcgctaagtacggctttagcactaagcgaaccaatttcgtcagtttcatcatcagcaccgaaggaattgaggtgaatctagccgatagacgttgtcaccaactgggacttggaggagcccttaatcaccactctattttcgtttgaaaaaataaaatttgcatattcatcagcggtcgcatcatcatgagttcaattcgtgcgtattcatccatttctttacagcatcatactaactaaccgtaggactgtcatcccgatccgaccgtagaatcaaggacggtataggtcgcgtaagcgctacagctaccatacgctattacatagtattacctatagcaaggttatcgctgccccccgtcgccgttcctactggactccgcattgtcgcgcctaccgagagggagagcctcgggatcgtccgaaaacacagcactttatttctttgcggcatcatgctaaccgaatttgataggccacagaagtactgtgttctcggacgatcccgaggctctccctctcggttggcgcgacgatacggagtccagtgggagcggcgacagggacgatgatgcgaccgctgatgaagatacaaagaaaagatttcgagcgaaaacagagtggtgattgagaattggattgaatgtttactgcaatgaacctggggggatttataggagattctaatctctcccgtcgtcttacctagaagagcgtttctttgtttgcattcccttacgacccacctctggtctttgaagccggcatactgacgtgttcgctaacacagccccgttcgagcctttgagaacacgaagcgaggcttcatatctgagaaccgtttgtcgggctccttttgcctttctttttgttgattgaatacagcagtttgaatttttcttccctttttgttgttgtcgaacagagcatttactttcgccaagccggaaatacgacccgaaacaaactatataacaacaacacatgtgtttatcttgcactagaattggttatcaacacgaaaaagccttgaaaattagagagggggtataatatttgatagcacggcagtgtccatcaagtcttccacgaatataactgatagaaagcatacaataaaaagtataagcagtagggtatatagcaaaagtagcaaaacatgacctggacacatagaaatattcgtaagataaaaaggaaatgttagcccagcaactggcgatactctgatagatataaggtcgtgtgatggcagaactgggaaaaatgttccggaatcatgtcataagacaaaaaaataatatcactttccatcgtagatttggtcgggggtgagtgaaaactggcctttctggatctctctcgcatcgacttggtccggcttgacgtatctcgcggtcaaagcaaagcgcaatttgttctcaggtaccaccgaatgctgtattggtcagatttgactttcaatgttggtaaagagtagaaaaccacaaacctcgtagtatttctggagatcctctccgtgcatgacaacaagatcaccatgattaagttccatcttgatggtaactggggcctctcttcccttgcggcccattgccagagcacggcgagagtcatcataatcagattgcgagatctcaccagcatcgaactcctccttcagtgtccgccgttcaccctcaaacatgcagtctttcagaacagggtcattctgcagaagggtcccaatttgcctgggctcagcccttcgggtagagccattgaaatacttatacttcatgcggacgaacatagttgctttcgctccaagagacagtgtggcgatactgggccccagcgaggactcgccgtcatcatggaactgatagaagaaaatttagcacagattattctcaattcacagctctgacttactccgatcttcatttcctcgaaatagccgagcgtcagtagctcatttggaggcaggtatttatctccagaagagatgactgccttctcagttgcccatgacaaacggcccagagcctggagcatgtcattaggtgcttcatcgaagcccttggaatcgacagatacgacatatttgtagggcataccctgtgtaatctcgtcagatagtggacactaaaatgtcaaggtaatgttgtcacttacatagttgacggcgaaatgtgaggtcaatgtacccgcaactgtttcaatgtgagaaatatttctgaagcttggatctggctcacttacctagactggactgaagctgaaatcgtttgaggccaagatcatcacgttggagattgatgaacaggtcgtctggtccattcgcacggctattgatagctttgttggacacaaaatgggtaatcgagccaactccatcaagtttgtaggtcaactttcggtaaggaaagaaggtcttgtcgtcaatctctggagtgttaaacttccgatcaaaaataattgctcgcttgatcggggccaactcgaaatgatcgaggacgactcgaagcgaaacgggcttcatgttcatgaacttttgaaaagggcagcttttcgcacattcctcgccaatagagtcatcatcgcatttccaacctcgccagaaagttcgtcggatacatttgaaacacatagggcacacaattcccttccaggcaatacgagctgtgctaacatccgcggcattctcatccaatgtcaacaaaagatcagggactagactgtagtgtggctggatttctgggtccggaggactgcgaaagctcaggaaatcaggattgaaagtgagctcagcgggaggggaagcgttttcaatcttccagaagtcgacgcaactagggtcaaggcacatccacccatcctcgtacaagcgaatactttccgtagagcatctctcacacttgagggtttcgggctttgtttcaaagtcccgtccatgaaggggcactggtgggagagagtacttggccgcccaccagctcttttccgcgaggttcagtttctcaaagcggactttgactccgtgtttcttgccaatcttttcaaaccagacattggtaacacgaaaccagtccataatgttgtaccgatgcggaagctctcgattgagaatcttgttcttgctccctaaaacggtgattagcggattcctttaaaaaaaaccctgataaattaccaataacaaggccaacagcaagcttggagttttggctggcgatgatgctttggacgagtgaattctccgagtcttggttcttttcgagtgtcaggtttccctccgaatccttggtacagcatccaccgctaatagaagttagtataggcaagtcgttactctgaacaaggaatccttacattcgggtaatgatgatctcctcatcgatataagtgcgggtaccaccgtcagcatcaatgaggaagccataacagaaaccttcattatgatacattgcaccttgggtgcagcgaaaccagggaatagcatcacaaagttgttgccgaccctggcagaaaattcagtatatatccatatgggttataaaagatgactagcagcatacctctgaccaggctggtggtgttccataaaccggctcaagagcttgatcattgacagcaacttgctggtccgatgagactgtccggtatcagtatggtatattcaataataacagtaaaacaaagacattgtcacctttgctggcttgttctttctttgttttggcgatccggcctgttcgcactggtctttgaactgcctggcgacgattgacagtagggcgtggtgccatcttgcacaactgttgtgcaagcaagctagtttgctatgaattaagtaagtattgtcccagaacagattcaaactgccaacagaatcatattcgggagtggaggttgatcgtcagactcacagtacagagggcccaatggcatcatataaggtaaattggtgttctaattgtgctcagtataattcttcagacagtactcagctttgagtaaggatctaatgcttgagagggatgaaaagtgtcagtggatggggtgaagggtaagacgggaggatgatagagctgggtgagggcccgatatatattttgccagagcggcaggggcgaagctggcagtaaactttggaatcacgttacaagatgagctaatcatgaggaagtccattgctgatgataaactttaaagtacaagcaaatggcattatgttaatttgatatgagaaggagaccgagaaccccccaagattgataccacaatgagagcacagatttcgttgctgacagcccattgggcttgtcctaggcaggagatactcaagatatgatcttctcggttacaggtggcttgcatatgaactagatgactggaatatgggctacttgggtaaatgattaacaaggatatgcacgccataacttacttcaactccacgtcccatagcagtagattatgaaaaacacctctttacactagctatgaattacacagaggtcaccagggcaatttaagtttcagaagtgcaagtagaaatgatatggtgattcatgtgttgccacagcacacgatcatcaaagaaccagggaggctgggagtgaacaaagaactgcaatgtctttgttcaccaggaagtccagagctgcctgcatgacatgtgacattgacatcgacagggaaggtgcacggcacctaggaacttgaggaaggtacgtgttcctgggggtataaaaggtctcctccccccatttctcttcttctcttcttcttctctcctccccattcctctgaccaccatctcaccgtagcccccgagacagcgttgacagagggacccgcagtggcccatttgggaaggtacgtgttcctgggggtataaaagggcccctccccccatttttcctcttctcttcttctcctctccccatccctctgaccatcatctctccgtagcccccatgagacagcgtaggcagagggtgccgtagcacatgctgcttgacctaccacagggatcataacattaccttgtttgttatgaggtccatgtaggtctgcatcagatatcaaaccgggcgttctcgtggatgttcctgaagtcgtggctctcattgccatttgacaagtcccacagaatacatgaggggtgtaaatcttcgtagccgaggacgcgaaggtagtcaccagatacattactcattcgtctggtttgtcctatatgttgaagtattatttagtgtatttcgagaatagtgaaatgttattgtctaaatgtgacaagttgtcgtttcattctgtagataagtagataatggcttcaaaaaataaagtgttggcgccgttgaagatatcccgggagcgaaagcgggcgaatgggattcgagtgatctgcacgccaagcccacactttaaatcccacgaggattctgctgtttattgaagtttacgagacagagtgcttgattgcttggttttcgggaaaattagggcttgccattcatcgtgaaccagatttacacctagtacatccttggcagctgaagttgatggatacatattgatgataccctcggatacgtatagaccgaggcataaagtactagcggcatcgtgtcgttggagaacctcgcaggtttgccgagcttccccgcatccgtcacttttccattaaatctcccctcagctgcttccaaggttattgcctagtccacgtgtgttcgctagaccccttgtttattcgcactgccatatatatcaactgtgggtaaaccgtaagaccccattgcgctcacctggctgcagctaacctcattccaaaaatagccgagaccacgtatatcatatcgctgcaactccgagaaactggaaaaatggtgtttttgccggcaaaggatgcgggccaattggagccaatccctgacactatcccaatcagcgagttcatgctcaatgagaaatacggacgagtgccacacgcaggctcccgggacccatacacatgtggtctcagcgggaagtcatactcgtcgcgtgaggtagctagtcgcgttgactcactggctcgtagtctttcaaaggaatttggttgggcgccaaatgaaggatcggaatgggataagacactggccgtgtttgccctcaacactgtaggtgcaatatacaatagcaagaagaatagaacggagcttattctttcgtcttgccattagattgactccttgccgctattctgggccgtgcacagactaggtggtgttctcactcccgccaacgcctcatactcagcctccgagctgacacatcagctgcttgattccaaggccaaggccctggttacttgcgttcctctcctcgccatttcactggaagctgcggccaaagctggtctcccgaagagcaaaatctacctactcgatgtacccgagcagattcttggcggcgtgaaacctccaacagaatataagactgtttccgaactcatcgaggccggaaagtctctaccgccggtggatgaactgcgatggagcgcaggtgagggagctcgacgaacagcattcttgtgctactcaagtggaacgtctggattgccggtaagcagtgcccccaacaacttgaataataactttggctaatcatgtgctgcaaaaaaaaaagaaaggagtgaagatctcccaccgcaacgtgatcgccaatacccttcagatcaaggcatttgagcagaaccatcgggatggcggtggcacaaagcccgcggacacagaggttgctcttggtctccttccacagagccatatctatgctctcgtggtcattggccatgctggcgcataccgaggcgaccaaacaatcgttctccccaagtttgaattgaaatcctacctgaccgccattcaacactataagatcaccacgctgttcctggtaagcatgtctttgctgatgagaagctgtcgaatgctgaccacaatcacttaggtacctccgatcatcattcacatgctgggcactcaagacgtgtgctccaagtatgacctgagctccgtgcggcttttgttcacaggagcagcacccttgggcatggagacagccgccgatttctccaaattctacccaaacgttttgatccgccaaggatacggtatgtggcattggcacttcttacagatacagagccgaaactgatattttcacgcacaggcctgacagagacgtccacggtcgtgagctcgacccacccgaacgatatctggctcggttcatccggtgccttcctccctggagtcgaggcacgcctcatgacgcccgaaaacacggaaatcacaacgtacgacacacccggcgagttggtggtccgaagcccaagtgtcgtgctaggctatctgaacaacgacaaagctaccgaagagacattcgtggacggatggatgcgtaccggagacgaggctgtcatccgcgtcagcccgaatggcgtcgagcacgtgtttatcgtcgatcgcattaaggagttgatcaaggtcaaggtttgtgatgccactggctgatggaaatgttcgcagtctaacacatcattcctagggtctgcaagtcgcgcctgccgaactcgaggaccatctcctcgcccaccccgatgtctcggattgtgccgttatcgccgtcccggatcctcgtgcaggggaagtccccaaggccatcgtggtgaagtctgccaccgcaggatcggacgaatcagtcacccaagctctcgtgaagtatgttgaagaccacaaagctcgccataagtggttgaagggaggcattcgatttgtggatgcgattcccaagagcccgagtggtaagattcttcgccggttgctccgtgatcaagagaaggaggcacggagaaaggcaggtagcaagatctaaaaagtttcgggatggctttgttggaaacttggaagaagcgccaagaaccatttcggtttagaagtatatacgttcacgggtagatagttcacaatcttcaatataatagcttgttgtattgtactatttaccgatagttattaatctctgttatgtaagtttaagatgacgagatcactggttcttgaagcccttgagattcgactgcctcgaggcttcaagtatcatttaagtggccctgaatgataatatagtatttcaaagagtaagtaacaaagctttcaagccacttggacattgctatctccctgaggggcctctcgagggactgcctgagggacttcctggggggctgtctggggagctgtctggggaactgtctggggggctgcctgggctgtctgtttgctcaggatttgatcaactgcagctgcaaggccacggcacagcccagaccaggacttgcgttttgagaaaatctggctcacctcggacagcagacgcaaggagcttgctttgcctgtcagacttccgactccaactaggttgagcggagtgtttgggccttcggcgatccaaatatgaatttccctggtgtctaacaagcgaatctccttagttggggcatccggctttttgatctcaggatcgaccacgagctcgtcgaatgcccatatatagaagaaagcgataaggaaacagagaggatcatggcaggaaaatttctgcttggctttcaatgtgctgtaaacacatacagcatgccacagacatttcctggcactaggtgcattgttttccatccaatgtttcaggatacttgttgtcgtatcgacctcggcttcctcgccttgccaccctgagaatgactcgagcatctgaagtgatacttgccggagaagagacagtatatgatgaatgacatctcgagcggcaatatagtctggtttggctgaggtgggaatggccgcgaatatctcgttcatggaccgaaacatcattgcgcgcagagcagaaggggttgatgagatatggtcccatcgctcctgaactggcacgccggtcacttgagaacttaggcccgatttccaaatggaagaatacgacattttgtcaaggaacagtctctcctcgctgtaaagagacagcatgtagagatttcggcggtaagcatccattcctgccatggtttcattggcttttctgacatcaagttgagtagatggaggttgtgatacatctaaaagttatggtcaatcccggagatatctgataacaaaaattggctcactttgatcagattggtatacatggacgaaattgtcggcatttctacgacaccatagtgattggcgacaggggaactcctcggggagttcatgctgcccaaatatcggctgacgatcaaataaaatgagctgaagacattcgagttctggcgaatggttagccaggctttcatagtttgtcgcaaggggcacatacgaaagatacaatgaagtaaacgtatacgagattctcttgccagccaggctctccactgtctcggggcttgtgacgtttttgttttcatgcattgatcaaccttcaagacacgggccaatgtgacgagtacatttcgctcatattgcagcttcaactgcgctttgtgcgacccgccaaacatcaggcagacatcactaagaaatacgctttgtgcataggataaagttgttgtttcgggtgattgaggttgctaatttgattaatataaggtacgaatcttcaccaggagatgaacttacgttttgtgctattgcctgacacaatatgtcgccgaaagatgctgaaaattgactggcattgccgaaagcgctatactgactcccaacagtgaccactgctaaaagtaccatccacgaggttttgtcatgcccaaattctagagcatatgggtgaaccacggggtattcatgatcgaagtgttcaaaatacaagtgcacaaagtcttggatgaccctccaccatggaaatgtcgcatcttctgtttctcctaggctcacaagaaatgccttaagtgattcatatattgagatgttggtcatcacgctgtaacgaaattcaggcaacaaaaatcgctcatctgaacgccgcatttttggaagtgacaatttcaactggcgggttgacttagaagggctggctgcagcaggagccgcaggggcacgagcacgaacacgagaacccggagccgaaacacgcggacggccccgtggacgaggagtcttgggaggtggtgttgcttgcgatgctgggccattctgatcattttccgagtcgtccgatatttccatgacatcccgcgaggcatccatggggtcctgtgtagtgaggtctgtagcaggcacggccggacctggagtagtctggtttgttccatcttcattcaatgagaaagatgatgtacgtatgttagatgaggagccctggtcttgaatattctgcggagataaaggactcgtctggtcagactgctcttgttttatatcttttccttcatggtgtttcctcaaatgagccgcaagcctatgtctgcgggggatcagaattggaacgtcgtatgaataggaagtgcctgcagcctagagactatggcataccttcgagtataggaccttggacaaaaacggcatttaaactctttcgaccccgagtgtccccggtcatagcattgttgtgacagtgctgtgccgcattggtcacaagtaagatggagttgcgggcgagtatgagttaggatatggcgtttcagatggtgtttacgcccgaataccttgtcgcattgctcgcatgggtaagactcctgcaaggggttcatggcttcttcccactctgaagcacatagatcaattcaaaaaatcaatgcaacctgcaattaaacagtctacaaccaggactgtggccatatattcacaaaaaatccagtaaatccagcaaacacctaccacgacgctatttcgcgtgtcgcgctgacaccaaagcggtcactaaagcggtaagagacagagcataatctgccgcggggtgtggatttctaagcggggaggtaagaaaaaaagatcgagggcattttaagttgccttaacaacctacttcttgcttcaagattgtttaggaacagcttatatcagaagggactgttaataaatcactcctttcgacttcatatctttcatatcgcaccgatccacggattgaaaaaataataatgtcttcaaacgacccgcaccacgagaatgaagaggactatatgcaggccgacgatgccgaagagatctttgagcgggatgaggatcaccctatgtcggagggagaaggagaatatgatgatgagaacatgaccattgaagatgagatcaccttccaaaacgactcagtggcacacttcgactcgcattcagactccgtattctgtgttgcgcagcatccggttcacaacaatatagtcatgaccggttctggtgatgacacaggctacatcttcgattcgacccctgcaccgcgtccagtgcttccatcaagctatgaatcaaaccctcagccaaaggagcgcgagtctctcgcgcctctggccaagctcgacggacacactgacactgtgaatgccgtgactttcaccgaacccacaggagagtatgccattacggcaggtctggatggcaagctgcgagcttatcgggataccacaccccagaagaccggactcgcatgggagttctttggcgaggtccaggaagtggaagagatcaattggatggccgtgtgcccctaccagcagggaaatgaagggactcaaaatgttattgccatcggcgccaatgacggcagtgtgtgggtcttccgtatcgatcataccgaccccgggcagcctatctccatcatccagaccttcttctcccacaccgaatcatgcactgcaggcgcatggacgcctgatggaaatctgctggcaactgtttctgaggacgccagcttctatgtttacgatgtctttggagctgctgccgccgctggtatcgagtattcccaaggcactaatgccatccttggattgactgcggaggatcagcgcttcgctgtggagggtggtctttacaccattgccatttcccccagcggcggtattgctgcagtgggtggtgctgagggcaacatcagggtcgtcggccttcctcgggtcacagcaagtgtccctgcagccaagggcaagggcaaaggcacaccctctcaggcagccggttccaccgctgcaggaactatcatggccgcattgcagacccaaacggacaacattgagtcactgtcgttctctcaggccccattcactcttcttgctgctgggtctgtggatggttcgattgtgatgtacgatgcggctcatcgatttgcggcccgtcggcacattcgggatgcccacgagggaagcgccgttgtcaaggttgagttcctgcctagcagcaagcaactcggtgcaactgtctcagggccccttgccaatgctcccgcagcccaccagaaccgctcttggatgctcacgtctgtcggtctggatggtgtggtccgacgttgggacgcacgtggcggaactgccgcggcttcgcaaggattgatgcaggagtggaagggacacatgggtgccacggaaaatgatgagggcgagcaagccggtggcatcatgggctttgtacaaggcttcgatggaaagcgtattgtcactgccggtgatgatggtatctcgctggtattcgaggagtagcctgcacaaaaaaagtttgagaccccaaatgcatagtgggggttcatgtcgataatgatattacgtgtttatagaagctcacagccaaaccaaccttgataaacagctcatgatatacaaggcaaaatccctgtagagtcgatgaccgatgatcgaacaataaagaaacatggttgtagtagtggaacaaaagctatgtacattcgacaaatcaaacccaaagcgccatctggaagctacgctccgtatgagccatgagaagctgcatctccgccctgacgacaaaagcccccggacttggcaaagctgtaggcgctataatccaaaactcggctgtggttctcgcggaggcgagacgactcttttcgtcgcctggggtatagatcctccgctcgataatccgttggtcggcggcattctcaattggtctccagagacgacccattagtggtgctcttcaccgtggtgagcatcgccatggtggtgatcatccttcatgaagaagtgctcgtatgtgcagtagccagcgaaagcgacagtcgcgataccgaagccggggaagagacccttgaagcggttgaatctgctgaaggggccgcagtagcgccaggtctcactgtaaatattagtgactaccacaattggaatcacatcggcatcacttgacgtacttgcgagcccatggatcccgcttggcccagatggaagatggggaggccgcggccttgtagtcggccatgttgaaaccggtggggttgggggcgtgcattgtgggtgttatcgggtagtcaatattacttaaagacggaaataaagagaaacaagatgtgagagactgcaaattggtccctaagtccgcaatcaaccgcaaagtgacacagtgaggagccgaagatgaggaaaagaggtgtgcttggcaattacccgcgctaaccgaatacggtacaccaagtagctctcccgccttcgagggacgaaactgtcacttcatccatgcgcatcttcgagacaacaaaatgccacctcccgttggcagatatgggccatctggcttgaacgctccatacaacatacagcaagctcaccttcaatctcaacatcccgcacacgcacagtctgggaatacgctacctcccccttcgcttggtcaccctggcttcgcgggcaatccaaataccaacatcaatcctttcacactatccggcggaattgcaaatggtatggcggtggccggctttccgggggctggtgcaggtgatggtggcggcaccggtctggcgagtcatgcggcacagatgggattcgcgcgcggtgcgcaaatgcaacaacagcaactacaccagggtcacgacggtcgattagcactcgaagcaaagggcgctgcggtaaagtcaaggattagagatgtttggaaacacaacctggcccatgagatggcggttctgagacagttggtcgacaagtacccttatatcagcatggtaagcaccactacgtgatccgtgcgaaactgaagtcttctgagagtaacgtttactgactaagacctaggataccgagttccctggtattgttgctcgtccgatcgggtcattttcgaacaaagcagactaccactatcagaccctccgatgcaatgttgatctgctgaagatgatacaactaggtatcacgttattcaatgatgaaggagaggttcccccagcttcaggcaatgatgccaatgggcaagtatatggtgtgcccgctccctgcacatggcagttcaacttccgattttcactagaaggagacatgtacgcccaggagtcaacagctatgcttgctaaatctggaatcgatttcgccatgcacgaaaagaacggcattgatcctttcgagttcggtgctcttttgattagctctgggttggtgctgctagatgacgtacactgggtatcattccactccgggtacgactttggctacctgatgaagatcatgctctgctctcagctccccgaaaacgaagaggagttccacaagcttcttaccatcttcttcccgtcactttacgacatcaaatacctcatgaagcatgccggtcgcaatcaagccgtcaacggttctcctctcacgcaggcggcagcacagattctgaccaatctaggccagaaatctggtttgcaagacattgccgatgaacttggcgtcaagcgtgtcggaatcgcccaccaggctgggtcagattccctagtgactggcgagatctactggaagacgcgccagctcattttcggaggggaaatcgacgacagcaaatattccggccaaatctggggcctcaacggacaaatgcccgcagtggcctacaacatggcccagcaaacgccgaacctcaatggtgccaccatttactccggcggaactcccagcactcccaatactgggtctcacggagctggcgctcatacacctcagcaccacggcgctggctacaatgccccaactcccggagcctatcaaatgggccgggtatgaggcacagtctgtgtagcacctgggttgatgtgatatgatgtatgtacatagacacgagaacatcgtgttattttccttcgatattcggcattgtcttcgcgcatattactttgcatgggctctctgtctgtgctaggttctgcgtctagacgacggtgttgggcaggaaggtgcctggcgtttgatatggctggttttgaatccatttacgaggcgttgacaggctctattatggccttgggcctttcgttcttgtgatctacgtcgctttttgtttctttcttgttgtagctagatcggacctgtctgtgtcctatgtataggaatcatggtttctgttcgctcaatttgcctggttttgtagatttatgagctccttttgcctgtccatatctagggatctgctcggatgagaggtccgcagttgcagatttaattgaggccaagcacacgttcccaattgaggattctcatgcgacatgcctgttttctaccccgcgatgtgacaaacgacatgaataacgcatagacgatagctgcagacaagcatctctttgccgttttgggattggagataccacgctaaccccaatcaggatatcagatccggcctccgcaaatatctatctaatcgatagaggtataactgcagggctcgggacattttcgagataccacctgcttgttaaatagctcgcaagcccagacctggaggagaatcaagtgagttaattgtgttcaactcttcagcactgcttgactcgaattggcactttaccctcatcaccttgaagtcatctccttccatatacctctagcacagcatggttctcgaccgactacaccaattgactcaccaggtcagcgctactgcaccgccacctcatccacttgatcctctgtctacggtggaaattgatgcggctgtcaacattgtccgcaaagaacatggctcgctcaacttcaatgcggtcacactatacgagccccgcaaggcccagatgatggcctgggtggctgatccagaaaatgcgcctcgtcctagccgagccgctgatattgttgccattgcgcctggtggtaagatctacgatggtgtggttgacctggaccagaagaagatcatcaagtggcagcacacaccgaatgttcagcctctgatcactatggaggatttgcaggaggttgagcatgttgtacgcaaggatgctaaggtcatcgagcaatgtggtatcattggaattcccaaggaggatatgcataaagtatactgtgaccgtaagtggacttccctcgtttgtcaaagattgatattgaccaaatggtattatagcatggacaattggatatgatgagcgctttggaactggtgtccgtcttcagcaagccctgatgtactatcgccctcacccagacgactcccaatatacctatcccttggacttctgtcccatcttcaacgccgagaccaagcagatcatccacattgatgtgccgtctgtgcgaagaccgctcagcaaggcgcctccaaacaactaccacccggcctcgatcgaaaaagaaggaggataccgaaccgatcttaagccaattcacatcacccagccagagggtgtgtctttcgaggtcaaaggacgcataatcgaatggcagaactggaatatccacgtcggcttcaactaccgggaaggaattgtcctgaacaacatcacattcaacgacaagggcaatgtgcggcctgtattctggcgtctttcaatggccgagatggtcgtgccatacggcaacccggagcatccccaccaacgcaagcatgcatttgacctgggcgagtacggcggtggatacatgacaaacagcctgacattgggatgcgactgcaagggcgcaatccactacatggacgcagcattcgtcaaccgggcgggcgctagcacaatcatcaagaacgccatctgcatccacgaagaagatgccggcatcctattcaagcacaccgatttccgcgacgagtcgatggtcgtaacccgcggccgcaagctcatcatctcgcagatctttaccgcagcaaattacgagtactgcgtgtactggatcttccaccaggacggcacaatccagctcgagatcaagctgaccggcatcctcaacacttacgccatgaacccaggcgaggataccaagggctggggaaccgaggtgtaccccggcgtcaacgcccataaccaccagcacctgttctgtctccgtgtagacccgaacatcgacgggccgaacaataccgtcttccaggtagacgcagtccaaggacccggtgaagtcggcagtgccgagaacaagtacggcaacgccttctacgccaaaaagacaaagttctccacacccatcgaggctatgtccgactataacgggtctaccagccgttcttgggacatggccaataccaacaagctcaacccatacagcaagaagcccgtcagctacaagctagtcagccgcgatgttcctccccttctccccaaggccggcagcctggtctggaagcgagcaggcttcgcacgccatgctgtccatgtcaccaaatgtgagttttgcaatttcccccttctgatatcgtgttccttttctgacttcattctctagatgacgacgaccaagtccacccagctggccgccacgtcccccagacctccggtgagccttcggagggtctgccggcgtggatcgaagctgctggccccagctgctctattgataacaccgacgtcgtgctctggcatactttcggtctgacgcacttccctgcgccggaggactacccgattatgcctgcagagccgatgacacttctgctgcgcccgcgtcacttctttgaccgcaatcctgttctcgatgtgcctcctagctttgcgcgcacacccacgcaggtggctgctaatgcgagcacatgtgcctgcaagaagaatgatggctccagtgttttggtttgatttgagattagacgttgatttgggttattgattttctcagcgtgcacttcttgtatatacactttttggcaaacgaaaatgattactgattcttgatctactttctgatttgcgtgcttttatatagcaggtactccgtagctgtgggcaattagggcaactaactatagatagcccactgcggccactttatctcattgatatttcaaactcattcagactgcactcgtaacaaaaaaaaaaaaaaacggagaaggaaagaagttgtaatgtcttttaatacgagaacagggaaatccagagatatgcatatcagagtataaacctcgcatgaacgcctcgaaagatcccaacaacaagggaatcatgctcagaaccaagtaaaccataaaagcctcgacacaatgcctagccaacacgcagaaacaaaaagggcagctgtgcaagagaaaacaaatacacggatagagcaatattctatgcggacaatccccgcaacaaagccctatcaacctccccgagcaaggaaaacaactccttcccaccctccgaatccttcccttcgatatcaagcgacttatgcaagaacctgcgcgcctcctcatagcgactcatttccgcaagacacttagcaatccgccaccaagccttgacattgccaataggcttcgagtcaacactagccttggcatcaaccaacgcgtcaggccaggcctgcattgccatatgggcctgtgcgcggttcgcataaaggccggacaactcctcgcgcgcaacgcctataggctcccagcccggccggctcagcgccatgtcgatggcgtacgagtatagcttgattgcttcgtcgtagttggatttgcggtgggcggcgttggcgctgtcgcggagtttgctgatctgcgcgctgcgcttggggtttacaggcaggggtgggggtgggatgttcggggggtcgaggctgattagggcgcggtgtagttggttgagttcttccagttcggcgttgattgcagctgtttgggagggtgtttgtgcggaggattgtggaagtgagagcgctttggtgctggggtccatgtacaatgggtattggttgtagatatcgatttcactggccattttggggcgggggagaccgtaggtctcggttttggggttgtaaggtcggtgttgcttcttggagttgttagtatatgcgctgcggtgtgcctgagcgggtgtttggggtgtggaatggaaaggtgtcattgcggaaagggttaactcatacaaggtatagttcaggatacgctgtctagttgttcgacaagcaaggttcactatgaggtcaatattcgtggttgtacttgtcaagagatgatgatggcaagagggcaagctgtccataaacccgctgataggaaaggcggtggcagaataattgtaccttgtagagcaggtaatagaaaggtgaatactactatggcttcatactgaccaaaaaggatcttgtttgaatatattgacaagatatcagccttcgagatatcatctacgtacgttgttgtgtatcaaagtattttcacctacaaaacacagagacatgattcacaaatgcaatacatgatacatctatatattgctagctccaatgaaacaaaagcaggacatacaatcgtaatcccagtgccaaaaaaagctcgtgagaaacacagtaaagacggacatcagcccaaagtaaacagcgatgcgccaacaccgcgctccatggtcaatattcaaggcgcaaaaaaaacaagacgactcatcaatcatccgggtatttcactgaaatatgcctccatgtacaccgacaacactccttactcaactcgcgtgccgtccgtacccactcacagatgagccaccaaacccagtatgagcggtgtattcagacggggtgtattccgacggattgtaatgagtagacggctcgtactgactagatggctccacatagtgctggccatgcgcaccaccgtaaccagtactgttataatcatggaggacgcctccaggggcggtagcggtgggatcgtaggagccttgcatcgcggtccggccgtgtgcgttgcctaggtcatccacctcactctgatgcaggagggcatagtcctcgtcctggtcgccgagggtcgatgggcccatgttgccgcctcggccggagcggatatcgtcctcgtcctcttcgaagtcctgggctgggttcgatgagaaggcggctttgctctgtgcggcaaaggtgggatcggagacggcgtcggggagggtgccggtgcggcggaagtgcgtgacattgcggaaggacatccaggaggtgatggcgaagaggacgctttttgtatgttagtttcaccaaggaatcgttggatcggcggaaggaatgcacgtacaagatgaaaacaccgataattgtagttgcctcgctcagcttgcacttggcagcgctgccgtatccccagttatcgcatcccgtcttggtggtgttggtggtggtagtggtggtcgtatcatcggctctcttagtagtagtcttctcgtcgtcgtcggtggtcgagcccttggactttccttgggcgacataggaagcgagacagatccacgcactgagccagagaatcgaataaaggatgtcaacacaggcgaaggcatagacgttaccgaagcgtcgagctcgtggccacatgggcactgctactagatagaccaggccaggaatactcaaccagcactgccatgcggtcgtatgtcagaatgcaacttttttttgtatcaaaacgcaaaactcaccaaaccccagtaccagcctgtgcgcccatctatgccatctcctttggtccagatagcgatggtcaaggcccatgcgaggaagataataaatccttgtatgaaatgtattatattcttcgtccgcccgaggctgccgcctgacgaccgcacttgaaacatgtcttgtgtaggagcgctgcaagggtgttgcgctttttgtattcggagggaagggagtggttggtgtcgtctatcgtgaagtcatacgggtcaaaaaagatgagagatgagacaaggctgaagaatgagacccgatggggtcttggcctggctgaagctccgtggagttttgttttgtttttgttttgttttccagtcgcaacgtcgcaactgtgcgattatttagatcacaacgatggatatatgtaaattaaggactttagatattcaatccgattgatttgtctctctgccccatcctcttatttctacagggcgtacgtaagtcctccacgtccgctgcccaggcgacagcccgttactattttgggaacttcgccacactctcttttggcttatgcgtatcattttacatcatagtctcgtttctcgtatactcatgttaacatacataataaaggaaaatcaagccaaatcaagccaaatcagtcaatcccgcctctcgtgttcgttttatcaacacccagatctcccgtaatggttgatagacatgtacatgccaccaccagggaaccggatcaagaatagagaacagcggatccttccagaacagcagctgcactatttctacctctgcaacttctagagctgtgagtgccatgcgaaagaccggaaacttcatgaaagtagcaggaataatggcggcacgggcaaatgctggcgctgaatcggttgatgacagtgtggctgtgacattggaagtatcgactcgattggatgggagcacagatagatagcctgaaacggggcaaggtacattgtatagcggatgatccacaggtcttgcgccgagtgtacagccggcgatgtagatagcgtgtcggacagaatgcgcctcaaactcttcatcgaccatgagtctgacgcagagatgacccgtcaaacgaacatcacctttggttaccaatttctgcatgaggctatggatcgaagctgccagagccttatccaaacgcgatgtaccccacgtaaacggaccagaatccgaaaaccgaactctaatggcttgaacgtggccacgcacaatcagtaggtctgcgaatagctctccaagacgagattgttgctgcagaatccaaggctggtccttggagatctggatctcgctgatcgccgagtatgttttgctcagcgtagtgctcggcaacagtatagccttctcactcgcagatgggcttgctcgtgagatatgataggcctttgaaggcgaccggtgcaaaatcttgtgcacagagtcgcgcgattgaaccctgtgatgctcaagcaccggaaggcctttctcgatcagatactgcctgaaagaatcaggatggccgaagcgaattgcgcaggtgacatcgaaggtgatgcacgtgcagctagtgtaaccctcaatgagctgtcggaccatcgcatcttccacgggggatgccttgggcgaacacggaatccatatgtcgacattttcgcggtggataatgtcagcgacccgggacatgtaatggtccttgggaatccggtaaaatgccaccagagccttggacatgctcccaccggagcgtacgggcaggtccaggtctgtaatatcggctccaaccacgcgatggccttctagagcccaagaccttgccagagtcagaccgtgggctgtccctatgcccgtgataaggactgttttcggggaaaagttctttgaacgtcgagtggctggtcggagataggctatcaataccgcggccgcgagaatgatgttatcgacaaacaacagcgataatgaaaggcatactcgaaggatatgccagaatactcgtgacatagtacccgataaggctaaagctttggcagatttaatcgacatgctgagtctgagtacaataatatcgaggattatggacctcgaatgagcagcctcgagtacttatagtagggcattatcgctggcaaggcgtcgtcgctggcaaattgtggaactgtcagttggaggggttggcaccactgaaggcccgtgaagggggggggggttgggctgcagatctagtgccgtgtgacgatgcatttttcgcgttcaacattccagcacttaaatagttcaagacccgtaggaaatccgtagaagatcaagacctctgtacaaattgaccaagagcaacctacaggtacatatatgcatgtaggtaacgtgcgtctcgggtctaaccgcaggatgtccggcgatcacatgcgatcaacgtgggatcaggtttccgatcatttcccagttgtctcggcgctgattccctgaagggatatctccgaggcgcaggagcttggcctgaaagggtaacgccatcgactggtgaatggtgaattgggcgtggtccgactcggatttactgtctctccccgaagtattccagttatccccgaggccgtttataaggtcgcatatccgcatggaatggattgtttatcagattccgtctagtttactgcacgtcatgtctcaaccaggtcccgcggtaggaattgctttttgattagattgagaaatgaacgctaactcatactctagagcgacgccggcaaggagctgaagctcctgcattacatctatgaacagccaaatctggatgaaatccgcggccatccccaaaaggtcctcgatctgattcacgagtttgagaaaaactaccattttatgaacgtcggcgccgagaagggcaaagtcgtcaccaaactcatcgatgaactcaagccaaagaccatgatcgagctcggctgctacgtggggtactctgcgattctattcggcgacgcagttcgtcgaaacggtggcgaacgctatctgagtctagaactgaacccagagttcgccgcaatcgccaatatgctcatcgagctggctggactgcgtgactttgtgcgtatcatcgtcgggcgaagcgacaagtcgctgcacaaactactcacctcgggcgaggtgaagaaagtggagcttctcttcatcgatcattacaaaccggcgtacaccacagacctcaagctgtgtgagcatctcggggctattgtgccgggttcggtgctcgctgctgacaatgtcatctacccgggcaacccaccatatctggaatacgtccgtagcacggtcgaacagaagcgcgaagcggcgaaggccgggcctgcgcaggcgtataatactaccgggatggccgaacgcacggtagagtcctttgtgggtaaagatgacgtgccgactttccagtttgtcgggaaccccaacttaatatatgagagccagctatgtcaacccgagggattgcgggtatgtttgcatgaatccccgagaaatttccgtcgctaactgcaagggtaacaggatgctgtcgaggttacgaggtgcgtgggggtgcaagaggcttagatggcgcatagccaatgacgcaagtgggatgatagaggggcagaagccaagatgtcaagaatagaagaagaatacggagtacccgtggactccatatgattatcaaacaggcgcagagtgctccgagtagaaagttgtatgtacagtcgaccattacccacttcatcggaaccggtaccccatcggaaccggtgaaccccacccgttgccgccaggaccttcctatgtctccgctgaatgaattccgggggccctataaaagggtctcgatacccactgattacccctcaattgaatcacaatcgatatctcatcatggctaagacttacaacgtcggtattgtcggctacggcttcagcgcgaagatcttccacattcccttcgtgacggaggttcccgagctcaagctctacgcagttgtccagcgcacaccgaagcaggatgacgatgccgagaaggaccaccccggtgtgaagtcgtaccgtagcgctgaggagatggtccaggaccccgcagtcgacgtggtgatcatcactactgcccccgactctcacttcgcactgtccaagctggcactggaggctggcaagcacggtagatgcccagaaatcccggatatcagttggtatatatactaacgtggaataatcagttgtctgcgagaagcccttcacccccacttccaaggaagcggatgaactcgtcgcccttgcaaagaagaacaacaaacagcttgccgtataccagagtatgtctcgtcacctagcttatccaaacctctactaataactgcctagatcgccgcttcgatgccgactacgtgaccctctccaagctcgtcaagaacggctcattcggccgcatctccgagtttgaaacccacttcgaccgtcaccgtccagaggagccggccaactctacctcatggaagaacaaggtcatccctggtggctcagcgatctatgaccttggaacccacctccttgatcaggtcgtgcatctgctcggactgcccgcacgagtaaccgctttcattggctccgcccgggagcacaacacgacttcatacgaggactccttcaccgttctgctgcactatgccaacggcagtatggttaccgccaaggcgactgtggtcagccccgaggaagagcagctgcgcttctgggtgcgcggtaccgagggtagcttcaagaaggtgagagcaatctactcacgtagatcactgcgatgtaaagaaatgtgaatgctgacctaattgatagtaccacctcgatatccaagaagatcagctcaaggccggcatcaagccccaggataagggatacggtcgtgagcccagtgagcgttacggtactctgacaaccatcaaggacggcaaccccgtcaaggaggtggttcccaccgtcgagccccccacttacaccgagtactaccgcaagcttgttcgcggtcttggtggcgagggtgaccttcctgctagcggcgcggaggctgctcaggtcattcgtttgatcgagttggctcgtgagagttccagcgttggacgtactttggacgtctaagctgtttatgcaaataatgattatgatatactcgataaaggcaaccttgaatatacagtgaatcttggatatagttctttgactccaatacacatcatgaatacccttgcagtcggaaaccaaataattagcgttacgcaaagcatctcgacagccaaaactattgatgtctaataattcgtcttcgtttagatatacatgttcatgttcatattgctgcctaacaagggcctggatgcgcaccgtcacatggtctgcacgaggggtctgagcagattttctcttcgaacgggaagctttccaacttgtccctgaaggattgaatcttgggctaagagatattgtgatggacgtcaaatcactaccagagtttcgattcttcccatatcccaaacatccatccgagtctcaagaattactaccagatgatccaattaccctcaacacttcgtcctcatggacttactgcggacccctcttgacccttgagtcatatagcctgccatcatcctttaccacctgggcagatgccacaatcaacggctcaatattgccctccttattctccttcctggcatatgtccacgaattcctggccaaaaacaaccaatcccactactggctcaccatcagagcaagcaaaagctcggacgagttcgataccccacgctggcacacagacgatttattcttctcccccctccaaccaagaaaccattcaagacgtgaatcgctcttctcgccaatcgctaatctactcaaatcgccttggacaggctcaacaaagaaccaaaagcccaaaccccgaatcttaccctccaaaacaccaaccaagcatcacgatcacccacgtcccacatctccaaccgcccaaatcccctctacaagccccgccccaacaaactggaaactcacaaccaccctcctaggccccggaaccatgttcatcccaccggcgacgaaccgcctagcccgcaccacacaacaagccgccaaaacagccgcccgcgccgcagacccagaccacgtatgtgtctccgtgcgctgcgtcgggtgcgccatggcggccgagtcggtgcgggcacggctggtcgttgagctgggtgggcacggggttgtgcaggcgtcggcaggggagtgtgttttcttccgggttggcgaggacgatggcgcggtgcattctgagcctcggtcgcatggtgatcgggtttttgttaatgttgtccctggtcatgaggcggatcttagggcgctgatggtgaagtgggggatggagtatccgcggacttggtgtgtggggttgccattggtgattggggagggagaggagtgtttgagggatgttgggggtgagatttgattgttttgtttatgataccctggaagacatatctctattatttagtatagacgggtgctctgggcgtatatcgcaatagctgggaggtatgagtttaaggcagtcaattgcattcttttaccctagtgatggtcatttcagttgcgttgacccaagaatagccttaagtcttgcacgaagatccggctaatgacgatatgccaagccgctagtcccaaatcgtagtttatgttaccaaatgcaaatccactgagtggacgagaaattagacctggcatcgaccttgggagactcgatatccgcggagaaagagagaaaggttgcgttttagaccgcagaaggaatttctcactaagggatagcggtatgcggcggataggggttattcctttctattcccgacaggggtgaatccaacatcgagatgcgttacatgggatttggtgaaacccaccagagcctacaatatagagcatattgtgcccatcgcataagtccagcatggcgacatccctgcgtgaaccgatgacgctatcccgtccgacgacctggaatttcgatatcgatcggtatctgaatccctttgtaccggcgccacgatggcatctcgtgccaaggcctgttgcatatatgctgggatatcgggatagaccacccaagccactgggcaatatcgtggtcgccttttgggcgtcgattggagcgttttgcggggtggccttggtggcatctgtttcgaaacgggttccttcttttaaagcgcacgatgcgacaacgatccttggcagttttgtgagtcatggtctaatgcgagagtagtggaacaagaacaaccagggctgacttgatgtctctttgatgatgatagggtgcagcggcagttattgaattcggtacgatcaactcgcccttggcgcaaccacgcaatgcaatcctgagccagatcatcgcttgtttcttcggcgtcggaatatcaaagttgttcgccttggacccgcgtgctgaagcgtataccgagctcgggggcgctcttgcttgcgctcttaccacggcttccatgctccttaccaatactatgcacccgccggcgggtgcgactgctcttctggcagtgacgcagtctcagactattgctctgggctggtttctgtttccggttgtgttgcttggagtcgcgcttatgcaggctgcggccgtggtcattaataatgtgcagcgtcaatatccgctgtactggtggacgtcatatcctctgtcgcctcggggagatgtggaaaaggctagtcgaaaggaaagactagagacacctagtgaagatagtctgacgggtatccctcggcggctggtagtagaacagagtgaagtttcggtgcctgatgggatattgctctctgccgaggaggaagatgtgttggagaggatccgtaggagactttgaggggaccatacatatcaaacctcagctgcatgtaatctctccaaatataagccctctccagggccctgtttcacacaaatcaaaagtggcaaattgacacctcaggcaccaaccgcggtgacgtctctcccaatcagaactgacttatcccagcggcccaccaatggatttttttttgttcaaacgtccgtgaaatccttgaacttgccaactcactcctctcggccaaataattaaacttataaagtgagaacaggtcagttcgactctcaatttcttattttctcccgtttctcgactgacaatcgataggattctatcgataagggcaaaccaccaactccactgctcgacgcccctccatttctgtccgccccgccagacgatccactcagcctttttgcatttctcttcaatctctttctgcattgtcatcctttctcctttccctccctttacctctccgtcgtcccttatttcatttttaaaacccatttttttataccgtcacacccgcaaccatggtttccgcctcgaaggctgcccgcatggccaagcgtgccgacgagaagaagcccaagaaggtcaccaaggtcgagctcgatgcccacggaaacccaatcgtcgaggatgcgcctgccactaaggatcagtccgccgttgataagctcacagctcagatggataagcacggtttgtccgatcgtgtcaccaccggtgtgctgtcatctctgcccgcctctcgcgacgttaagatcacctcttgctcccttgtgttccacggaaaggtcctggtcaccgattccaccctcgaattgaccttcggccgtcgctacggtctcctcggtgagaacggttgcggaaagtccactatcctcaagtctattgctgcccgcgagttccccgttcctgagcacatcgatatctaccttctgaacgagggtgcaccccccaccgacttcggtgcccttgactgggttgtccgcgaggccgaacgccagttggaggatatggagaagaaggccgaggaggttcttgaggaatctggccccgataaccctatcctcgaagacctatacgacgtatgtattttcaagttttactctccttggatccagaacagaaactaactctcatatagcgcatggacaagatggatccttccactttccacgttcgtgcctctctcattttgaccggtctcggcttcaacaagtttaccatcaacaagaagaccaaggacatgtccggtggttggcgtatgcgtgtggccctcgccaaggccctgttcgtcaagccctctttgctattgcttgatgaccccactgcccatttggatttggaagcttgcgtttggttggaagagtacttgaagaagtgggatcgcactttgatccttgtctctcactccatggatttcctgaacggtgtctgcaccaccatgctcgacatgcgtggccagaagctcctctactacggtggtaactacgattcgtaccacaagacccgtagcgagcaggagaccaaccaggccaaggcctacaccaagcagcaggaagaaatccagcacatcaagaagttcattgcttccgctggtacctacgccaacttggtgcgtcaagccaagtctcgccagaagattctcgacaagatggaggccgatggattcatccagcccgtcgtcgccgaccgtgtcttcaccttccgcttcgccgatgttgagaagcttcctcccccagttctctctttcgacgatgtcagcttctcttactccggtaagtgggaggacactctgtacgagcacctcgacctcggtgtggacatggactcccgtaccgccctggtcggccccaacggtgtcggcaagtctaccctgctacgtctcatgaccggcaagctcagccccatcggtggccgtgtctcccgtcacactcacttgaagctcggtgtctacagccagcactcctccgagcagcttgatcttaccaagtcctccctggagttcgtccgtgaccgcttccccgagaaatcccaggactaccagtactggcgccagcagctcggccgttacggtctgagcggtgagggccagactgccctcatgggtaccctatctgagggtcagaagtctcgtattgtcttcgctctcctcgccatcgagtcccccaacatgattctgctggacgagcctaccaacggtcttgatattcccaccattgactcattggccgatgccatcaatgcctacagcggtggtgtcgttgtcgtctcccacgatttccgtctcctcgataagattgctaaggacatcatggtctgtgaggacaagactatccgccgctgggacggctccatcggtgactacaagaaccacctccgtaacaagatgttgtctgccggtgccgtttaagggctttattgattctctttgcttgttcaacttttttcaacttctttttttcccctattgatgacgacgaaatgctagacgagaactgaaggaatacaaatgcccacatcgtggcactaaaagtttggatcccgcaaacagggacactccaacaaaaagttccttggattgggatggttttcatttaatttctttttgtccgttagatcgtttgtccttccccccttttccgaatagattttgggttatggaggattggacttttgcgtttattgctatcatgaactcattacccctgattcgatccgtctgtttctttgtcttatgcgtccttgatagagtgtttagtcctcttttccgaggtgaatataagggatgccagttactatatcgtatggcgctacttgtatatatgatatgcttcctcttgatactttcgatgtttccatgacctgtctagatatcttccccgtcagcagtgtcgtgactgagcatcggccgggactagttcgctaattgacaatgcctttcttttctttcttctctttctagttattcttatcccaagactaatagaatacaccatgacgagccccgagcaacaaagaacatcaacaatgatcatagtacctcattgtcttcttcatcttcttgtttctctctatctaaaacaaagaaccaaacccaagtcaccactaacagaacctgcatatataaatacccgcggatctctccacaatcccatcccatccataatctcattctccacagcgacatccgcagccatatctaggtaagccctaacaaattaacccaccaccagaaacccacccacgcacccatgagcacaatggacggatctcgcgtgcacccgcataatttccgagagatctacacaaaagcctgcgaagccttcgcccacaagctgcaatgccaggtattcgttctcctctgcccatcccccagcccagacatggaagagatcccgacacggctggatgagctcggcgagcgagtcatgcagatcgggttcctgggtgaggtcggtgaggtcggtgtccgggatcataaccgcgtgcgtgttcgttgggggtcgcttcctattaaggagatttgctttcagattaagtgggaattggctgttcttaaggatgagattgctggtggtcagacgccgcctcagttgattgcggagcttttggcggagattttggattcgttgcctttttgatggattttatgtctatttgtttatcgtgcttagtttgtgtactccataggtcttgtaggataggagttcgtgtttgaggtctggtaaaaagaatgacactaatagtataatcacaggactgatggggtttcaatgtcgttgtagttctacggaaggtaatacgcagcgtcaattacaaccactgatatcgcatccattgtatatcaaaaggctgaattgagtttggtttccatgtcggatcggagcaaaatagtcctgagccatattgtagtgtttcggtgcgatgatggcagggatgcacctgtgccctttccgcgtttgagactcgaggttttaggtctgtatagaccgagagatctactggccgcaactcggacctggaatttggaaatgtattatcatgtccgacggttggtgcatatataagtgcgtccgttctgatttttgatattaaacatccgtgtcttttggtgcaatggcatgcatgcctattactacttggttcgctgagtgaccaactccggaccaaaaacatcatcatcctgacggacagcctgcccttgttctaatttccgctttttcgctaggcgttctgtttcgctctcggagttgactattccagtgtcactttgaacagcggaagatggctgggttgattcccgtttagttgcagccaggttcactttctcggggttctggcaatgatatagtttctttgcgatgcgcttgaggctcttcatttgcgcggggtcggaggagagaggcgtgtaggattggagtagagcagagcactcagtcaagacgtgatgcagcttgaagcggatttcgtatagagggttcaccaggccattttcgtctgtttcgggggcagggattgtggctgtaactggaccaccgagtttgacatccagcaaaaactctgctaggggacgatctgccagtaaaaaggcagagaaccatatctgggatggtgtgtacaagaagtaggcgtccgtcatctgcgcagcggatttcagcagctcacgagttgtgccgtgggctcgagcgattcgatctgacattgaagatgatgggacgggaggaggtgcgatggacagcaatccttgctggaggtcttctgcggtctcatatggtagatggggggccggttgtccttggccttccgcgatggcttgtagttccatgacgccgccttccagtcctcgaaacggatgccgtacatcaaaggtgaaacgcagtccctgcataagcaagaattccggtgcgatgacgtcctctgtctttgtgtcaccaggaattccatctgcaaattgtcgaagagatatatagtaattatcggttttcgtcgcgacgaagagcgcacacgccatgatcgacttcggatggtatgtcatcggtgaattggttaggtagaagcggcggaggtattggatcgcggtggcctgtatgcgtagaatgaaaaatgtcagcttcccaagcttatttgtacttatgaagagcgtaacgtacccggaccattgttgggattggtggcttatatgtctctcccagctctagcgtcttctcgcagtaataccgcacgagaacgagctcctcctccggtgtcaaacattctacatctttattcttcgtgtccgtgttgctttccggtagtggtgttcccgccgcggaggatgcggtcgactgatgagtctcgcgcgatctgtgcaaagcggcgcgcacgcgctcgctagcaacggcatttgtcgtagctctgagaaattgcagagatggctcggtgtatgaccacagacggtactgggacgaggcgcggtagatgtcatcttcaatcattgtgttagtgctctcgtcttgttagaagaatcaaagaaacctttcgaggtttattcttcggcggagataacggccggctggtttgaaatttcgagaagaaatagacgtaagttgaagggccgttttagatatgagaataagtatttgacgatcctcaaggagctcagcaattaatccacttggtttcatccgaggaggttcgaggcttatcgataagaccaaccctcacttcacctgagcagccctagagctctgtctaagggacgtcaaatcattatattgttttctagtcttttacttattttattggtttggatatcaattaaaagctatgtaacatatatttgacatgcataagccacccaatgcaatccgcccaatgcaattcattcatattccatatgtgctttctgcctcatttcatcccgagttcaccccagaaaccagaatatacatcactcaccgagaagtcgggcggcaatatcacccatacgaccttcttccaactcatagtcttgacctccccgtctttcgacaccgacatatcggaaagcagccacaacacgatcaacgtcgaagcccatgctggagaaacggtcgattaaattcttgttgtacccatcatatctatagataatagtcagcaggatacccaatgaatggtagaagaacggctcactttgcgagattatcttcgctagctgcttgccgagtgtcatctaggcttgatccgcttccattgtcagcactacgcacgggagctccagcatagaggactgcccagtcgcgtgcaacacgctcaaattccttgggtgacttgagaagcatattagccacttcagcatcttggggatctttgggctcgggagtgctgagcaaagactgcagtgaaagcagagcggacttgatagtcagaactggtgaccaagcactggaaagtgtgtcgaggcagattgcgccctacattgcctatcagatcccaaattcgctcatatctatattataagggcactgaccgtttgactgctgacatttggatgccacactttggtctcaaacttcatggtaggtggtcgaaaaggatagtccgttgggattttgatatcgatatcgtagatgccaccttcatatggggtacctggtggccctggaaacgacccccttaggtgagtgagatcgtccaggttgccaaatggctccgcctttatgtgagagtggacatcggcgtgaatgtccgcaatttcttttccaatgcgacgcatacgattgctagccatggcgattcgactcgtttcaaaaagaggtcaaacaggagatgttgaaataaaccactttgtgtgtaaattgtggagacaaatagacctatttccgtcttgccaaagactgcacaagagcgtggaagctgccgtggagaggaggacagagtggggctaatagtaggatagtgttaggaaggtttcagatcaagtagagagcctcacacatggggtatgaaatcctctagggaattgaaagcaataagataaacgaggatctcaccaaaggaggggaactatacagggaatcagtatgagtgatgagctcaaacactgtcacctgtcgcctgttatatgcaccttagatatacctgagatatatacctcgacagagaacacgagtcttaagtctcggttgtgtgaggtaaacctcagtatagagcctcggaggaatataaatttcttcgattgtcttcgagaatgtcggaggtacaaccttggaagccgataactaagacaggcgttaaggcaacaggtgtggatgacgcagtggcggcctgaggcgtaaatagtcacgtgtgggcctaacagcttccagctcgcccagcgtcctggcctccggcgataccaccacatctgcattgacaaaccatccctttcgactcgtctttcacatcattcaataccaaggctcgggatttacctttctttgattacatttgcaacttcacaccagggattctgatagtctccatctcggtggctgacaaacatggtgagtgttcctttgggaggttatctcgatttatattctaacattcaaaactagggtcaacaacagtctaatctgggcggcggccctggaggccctggaggcgatgacaaggataagaaggtatgtttccaactcatttccactgctacacccagcgctaagaccatatctcttttatcagaaggagaagcccaaatacgaacctcccccaccacctaccactcgtcttggaaagaagaagcgcaaggctgccggcccaagcactgcgtccaagctccccgatatctaccctacatcgcgatgcaagctacgataccttcgcatgcagcgtgttcacgaccacttgctgttagaagaagagtacgttgagaacatggaacgcatgcgcaaggccaaggctctggccacgcaagatcccgctagagggggtagtgacttggatgtgatggatcggaacgctgatgagcggagccgagtcgatgacatgcgaggcagcccgatgggcgtcggcaacttagaagagttgattgatgatgaccatgctattgtctcaagtgccaccggccctgaatactacgtctcgatcatgtctttcgtcgataaagatcttctcgagccgggtgccagtattctcctgcaccacaagtcagtgtctgtcgtcggtgtactgacggaggagtctgacccccttgtctcggtcatgaagttggacaaggcgccgacagagtcatacgctgatattggtggtctggagcagcaaatccaggaagttagagaatccgtggagctgcccttgctacaccccgagctttatgaagagatgggtatcaagcccccgaagggagtgattctttacggtgccccaggtaccggaaagacgctacttgctaaggctgttgccaaccagaccagcgcaaccttcctccgcattgttggcagtgagctgattcagaagtatctgggtgatggcccacgcctggttcgccagatcttctccgttgctgctgaccatgccccatcaatcgttttcattgacgagattgatgctatcggtacgaagcgatacgactcacaatccggcggtgagcgagaaatccagcgaaccatgctggagcttttgaaccagctggatggattcgatgatcgtggtgacgtgaaggtcattatggccaccaacaaaatcgaaacactggacccagctttgatccgacctggtcgtattgatcgtaagattctcttcgagaatccagaccgtaagtgataccctagtatctactgctgcgccagcttactaacaattcctagaaaacaccaagaagaagattttcactctgcacacatcgaagatgtctctcagtgatgacgttgatctcgaggaattcatcaaccagaaggatgatctctctggtgctgacatccgcgctatctgtaccgaagctggtttgatggccttgagagagcgccgaatgagggtgcagatggaagatttccgggctgctcgtgagcgtatcatgaagaccaagcaggacggtggtcctgtggagggtctatacttgtaagcgctggaaattatcttgagggtgtgccggagtgcttgcgctggagacctgtactcagctaggtccctcgtgtattgtaataatcgagtaacgaacggtctcaagggtctactgcccagcaatttccctaaatatattcataaacatacatcgaaagtgcataatttgtccgttgtagttagtaatccaggttgtttgcgccaagcttatcagcgagttgcaaacactgcaaacaagctcattatcaggtcgaagcgcctctccccattgtcgcaaagtttctcacacaatcaaccatggatgaattcgacgaggaagcattcaacaagttctttccctcaagctttgggaagcaggcgaaatcggttgatgttgagtcccagatcgaccgctccaagcgtgttgatgttgcggctccgaaaccagaggacaatgaactaagcattgcccctagctcagaagcaagagggagcgacgatgagcaaaaacacagtgatgataatagcgacgaagactctgacgattcagatgatgacgaggatgaatttcccgtatcgcatgagcttgttctcaaggctcatgagcgtgccgtgaccactatgaccgtggacccctcgggggcccgactaatcacaggttctaccgattgcacactgaaactatttgactttgcctcgatgaccccatccacactccgcgccttcaagtccgtcgatccttcagctaagaaagcgacggccgcccaggacacccacgccgtgcactacgccgcgttcaatccgctctctccaagttacgttctagctgtgactgccactgcgcagccacgcattctcagccgtgatggtgagatactcacagagtttgtgaagggagatatgtatctacgagatttgcaccataccaaaggacatgtgtctgaggttacttgtggtgcatggaacccatctgatcctaacatatgcgccactgctggaaccgacagcacaattcgcatctgggatgccaatgttggccgctcgcagaaggaggtgatcgtgcacaagtcgcgggcagctggctccgctggtcggactaagatgactgccatcgcatggggctccccgaaacaaggaggggccgacattctggtaggtgcaggtcttgacggaagcctcgctatgtggagtggaaatggcccatacaccagacccagcgcagaaattcgggatgctcatgtcaaagatacatggacaagcggtcttgatatcagttccgatggaaggcttgttatcaccagaggtggtgatgatactatcaagctttgggataccagaaagttcaagactccagtcacaaccgtcacacatacctcgacatctttccgctacccgacatccaacattcagttctctccttcgtctgccaatatcatcacaggttctgaaaccggccatctgcatatcctcaaccccgctactctcaaggcagagctcgtgactcctgtgacaccgggatcgcctttgattactgttctatggcacgaaaagctcaaccagattatgacaggctctgccaatgccgaaacccacgtcctctataacccgagcatgtccacgaaaggcgcagcgatagtcatgtccaaggcaccgaaacttcgccatgttgatgaaattgctatgcccgcggacttgaatcagggattagcaggtgattcggtggtcgtcggctccaatggagttccgcattacagctcggcgactaggtctgctcgtcatcctacagttggctttacagcctctggtcgctctcgcgatcctcgacgaccgcatttgccgatgcagacaccatttgccaaaaataccccagatgagaagcacatcctcgagcatattccactcagctccatgcgagacgaggatccacgtgaagcactcttgaaatatgccgaccaggcggagaaggagcctatattcaccaaagcatacaaagaaacacaaccaaaggcgatctatgcggaactcagtgatggtgaagatcaaggaccggaaaagaagaaagcaaagcgatgatctgcgatgatctgcttggatatgtactatattcaccacgacttttggtatcggaagcgtcccgttgagtcgcgatggctcaaattaagctacctatgcaatatacaaatatctagtacagcttgtagtttcatatgaatcccaatctaagcacctaactccttacattcgggttgtcccctcttttgctgctctatgacgtcccccaagagcccgacaatccccaaccgcccgcccgaactgccaatgatatttgacctcgccttcgacgttatttcaattcgtatctgcgctgcggaacgctaaatcaccgcgtctcaaatgacatcttccaagttggaagccttggaaacggccccagcctccggagggcccgggggtttgtttagtgctgacatatcaattatctccgcggcgggcctccgctgttagattaccgcctaaccaaacctcttcatactcattactagtacccttgtccgccgtgataatcttcgcgcgagaaagccggattacccggaacagaatgccgtcttttgcgacttgacttgagatcaaatgctcaccgtcgaatcttggggttcgttttgatcggccgtacccaccgaagagctgaggtgtaaggggtgcttaacaaaggcttccccgccaaagcgtgcgataaacagtactcgagtactaggatcgcatcatttcatcagaacggatggcatcttaccagtcgtcgctggtagcaagcctgctacctggtcttctttcttcggctgtctccccgtcaagttcatccacattcgcgacttcttcttcccatcaccttttcgttgcgccatcaaattccacatcagaaactcctcatgaccacgatggaaataatgggggaggcatgcatgaatggtcatcgctgattggtattatcacggcgttatgcggcaatgttttgatttcattagctctcaatatccaacgctacgcgcacattcggatcgcaagagaatgggaacaggataagaatcgcaacgggaatttcggaaacaacgggacgcccctcgggtcgagggggaggtcccagaatcaatatcgagactctgagcagaatgatttcgaaccttatcgtgacgatgatggcgacgacaccgagggcacaaacattggtacgatttctcgaaccactagcaccggaagcaaggatggcgcagacggtcgcaaatcctacctcaagtctccgtactggtgggttggaatcgtgctcatggttgtgggggaaatgggtaatttcatggcctacggctttgcaccagcgtcgattgtctcgccattaggagttgtggccttgatatctaattgcattattgcgccatgcttgctaaaggagcaatttcgcaagcgagatctctggggcgtgctcgtctctattgctggtgccgtcgttgtggttctcagtgctaaatcgtccgaagaacaaattggacctcatgaaatttgggtgaacatcaccagatgggagttcctgctctatctagcattgaccacatcgttgattatcggcctcatgtgggcaagtcacaagtatggctcgcgatcgattcttatcgacgttggactcgttgcattatttggtacgtttctatttagttatttttacttttgggattcatttcttgttggtcttgttgctgactttgtaaaaaaggcggatacacggctctttcgacgaagggtgtctcttcgcttctgtctggcacattgtggcatgttatcacattccctattacctatctgcttgtcttcgtccttgtatttagtgctttgatgcaagtccgttacatcaatcgtgccctgcaacgcttcgattccacccaggtgattccgacgcagtttgttctcttcactctcgctgtcatcgtcggaagtgcggtcctttaccgtgattttgagtcgatgacggccgagcgcggaactaaatttgttggtggatgtctgttgactttcctcggggtttacttcatcacgagcggcagagtccgcgctgacgatgagtcgtcattttcatcagacgaggaggggtccattggtttactcaatggtgagaggtatcatgacagaattgagttgtctccacctgcccatcagccgaagacatcacacgtttccacagaagcacaatatgacgttccacagtccccaaggggctccatattgagccaaggcactgccgaagacgatgatcagtctacacctagaggtgttctttctgccgcgccctcttcgcctcatggatctttaactggtgcatctcctctgtctgctccatcgtttgacttcacttcaccattgcggcccccctctcgcatgtctaacccatgggcagatatccgccctgttactcctcccgggcatgaagacgaggcaatgcaatcctcaacagttcttctgcgtttccctcctgcacctggccccgaagaagcaacaggagccaatggaaatgtcggtgccgtacgacgtgcttcaacacccccgcttttaaatcaggccaaccaatctatccacaatgaggctccccctgaaacaacatcgcggcgcgctttgcgcaactctatctctcatcgtttctctcctggacctctgcttcccgcactttccggtggcttcagcgcggtggtcgctgattctatccgtcgtggtgacggtagtcctctcaaggatcggccaaggcggagattaggacgtcggcgccaactcgatggcgcttttgcagatacatcccttgagggtcatggggatgcggcgctttcacttgcaactgctcgactccagtccgccaccctagcggacagacctgcggagactggagatctcgcgacggaaataaataacataccaacacaacacatcaaggaggatgtgacccatcttcgcagcctgagtgactcgtggaatggggggcttgcgtggctgggtggtgctctccgcaaaccccagaaaacccaaagagccgacagtgttgctgtcactggaactccaacaccagagaatgagacacaatccgaaccacactacaacatcggcgaccatgacgccgaggcttcctagctctgaggcataagaacagttcattagagtggccatctcactcgaactctgtatacatttgctcttttccctcgatatctctccccttggcgcttttcccgataggtttctatcggcatattcttgtaattaacattgcatactgcgggtatatgtttaagaatttatgtatttcttccttttcacgctgtatatttcatccgtgaaggaggcctcggccaccagttttacctttagcctctttatccgttcaatttatccatattgatcacctgccacacatcttgttccggaagtatctatcggagaaaacgggcatcccaataggtaaaaaggttgacagcacgtaccactgcccagaaggcgcagccagctaccccagacctccacttctcgagtcaatttagccggacagccgacagtccttcccctcaaccccggaatgccatgccaatgtggagtaggggattgctccgtctcctgatagtactagctcggatcaaacgactctaagcaaggcactactgcagctgttcagactagcttgatcgtttctagggttgaagacggcttcatttccgatgcacaatggtacgagctacctgcctttttctatctacttcaattcgtgggatcattaaatcatgtcatacaattcgattaacctctctccgcagttcaagggtgtcgattgcgggtctgcatggacttatatgcaagagcttccccaggaatttatttttcttccttccaatcccatgctagtcaatctacaacagttgacgattgaatttggaaaataaggggttgtcttctcgaaatggtggccaatctgctttccaatgggctgctgctcgtgcagatctttgctgccctagctgtgggaagacagagcctcagccctctctacaaggattccaatgctccagtggaaaagagagtacaggacctgttgagccggatgaccatcgaggataagcggtcccagttgattcagggtatggtttcatctcaatcgctgccatagggaagttataattgctgatgcatttttgtacaggtgatattacgaattggatgaaccagacctcgggagaattcaactacaccggcctggttgccaacatggagctgaaggcaggcatgttctatggtatgaactcctctactcagctatttgatcccttttttatcggcccgcagaaaccaacagtaatgccttacagtcggataccctgttgcttgggattggatctcagacaatatcaagagggcccaggactacctcatccacaacactactctgggaatccccgcaattgttcagactgagggtatgtactccaaggatacattctccagctgcaatgaattcaagctcatacatttcttgcattaggtatccacggattcttgattggtaatgccactattttcaattcgcccattgcatatggatgctcgtggaacacagatgtaagcgggtactatacttgcactgtcatacatactgtcatcgagatctaacacggtgttgtgtagcttgtcgagagaatggcagaaatcattgcacaagaagccaaagcacttggtgttaatcagctctttgcccctgttgttgatctcgctcgtgaacttcgatatggtcgggtgggattcatctacatgttgatacatccatgacgactaagctaacaaagagaaaaggtagaggaaacctttaccgaagaccctttcctcgccggcgaatatggttatagctacgtcaagggagtgcagggcaagaatgtgtcagccatggtcaagcactttgcaggcttcagtgcccccgagcagggactcaatactggcccagttcacggtggtgaaagagagttgcgcacaacgtatgtcgacccccaagctcagagaataaacagttgactaagtattgcataggtggttgccttctttcaagcgagctattgtcgatgccggtgcttggtccatcatggctgcgtaccactcgtaagtctaacctgatctgatgatataccgccatgctaacatatgtttccagatgggacggaattccagcggtctctgactaccacactctcaccgagatcctaagggaagaatggggatatgaatatttcgtcatgagcgacgctggtggaagtgacagagtgtgctcctacttcaagctttgtgagagcgatcccattgacatggcagcggttaccacacagctgctgaatgctggaaccgacattgagatgggaggcggttcattgtgagagctttaatgaaacaagcacgacccagaaacatacactaactaccgactagcaacttccaaaagattcccgagcttgtcaagtctggcaagctcgatattgacgttgtggatactgctgtggccaggttgctccgggtcaagttcgaaatgggtctcttcgagcacccataccctgctgcgcctaggaacgagtggcgttcgctcattaacagccccgaggctgtgcaagtcgcaagagacctggacaaggaatctatcgttctgcttgagaaccacgaagacattctgcctctgaagaagtcgagtaacattgcggttattgggcctatggccggtggtctcatgaacgtaagtcacattcttattccacttttagcctagatattaatgacgtttatagtacggtgactacgttgtctacaggagccaataccggggtgtcactcccctcgaagggatcaaggctgcagttgacgacaacgcccaggtccactatgtgcagggatgcgatcgagcgagcaatgatcaatcaggctttgaagaggcaattgaggccgcaaaaaagtccgacgtggccgtcgtgattgttggaacctggtctcgcgatcagggggaactctggacaggactgaacgcaacgtgagtaaacccaccttgtttcaatatatatctgaaagtgtcagtactgacagacaaaaagaactggcgagcacgttgacgaagacgatctgtcccttgttggcgcccaaggacctctgattaaagccattgccgacaccggcgtgccaacaatcgtcgtcctgtcaagcggcaagcccattacagacacatggatcgcaaactcaaccgctgccctcgtgcaacatttctatccatccgagcaggggggtaacgccctcgccgacgtcctttttggcgactacaacccatccggcaagctatctgttagctttccccgctacgtgggcgatctcccgatattctacgactacctcaactctgggcgctccatgggcgacgtaggccataagtatgaaaatggaactctcgtgttcggccactcatacgttctcggtgacgcttcaccgtggtaccccttcggctatggcaagagttactccgccttcaagtacggagctgtcaaggtcgacaagagcaagatctctacgtctgagaagactgtcactgtgagcgttgatgtgactaatacccatgctacccgtgagggtacggaggttgtgcaggcctatatccaggatgatattgcctcggttgttgttcctaatcgtcagcttaagggcttcaagaaggtggttatccctgctggaaagactaagactgttgagattcctattaaggttgatgatatcggcctttggaatacttggatgaagtatgttgttgagcccggtcagttcactgtccttgtgggtagcagctccgaggatattcgtggtaatgctacgtttattgttcgtgatcgttgagcttgatatcgaagggaggcatagttcttaggacgtagtccgatgtgtgtgttgtttggtgcatcttagattgtatatatcttgcgtgatgtgtgaagatgagagattcgaattttcagaaacccagtcgctttccctacatcattttctcctcgtatcctaagctgattttacttctcgacgactagatacactagaatttactatgcactgtgatacatatctaacattatttatctcgcctggatgattctaccgggctggtatgagatgataatcagtatttgccgtactaccgatcgagatacgtgataatcaattggattcgaagcttcataaatggtgtaatggggatatctcataaaggcatagcataaaggaccaaacgccgtttctaaccaccgataattgatgttgcgagactatgctgggtcacctgcagcacgagaccctgcttgaccagtggagggacctcgaccaggatctggggagaccaaaggttccgatggcttgctggcaccactcgcaggtggattgctttgattgtcaccggagcgaccctctgctctccgagttttagcaccctctttcaatttctcccagcggtctcggtatcgcccaagaacattcttgagtttgtcgttttcgtgagcaacactttcaagtttattctcactacgtcggatctgctcctcgagttctttgatccgcgcgtcagtatcagccgcacccggcggcgcagtcagcatagcaacaggagatgcagtggccgtagaaggctgcaaataatcaggcgtcccggcgctctggcggtgcatcattcggattgattgctgcagcgccattgacgaagattgcgcgctcacctcccacatatgcaaccgtgtcgcaagcgaatcggtcaaacctctcaacgtctcattctccacctgcatctcctccattgtcttgtgtgtctgcggagtggtaagcttatcgggtgcgccgcggcgtcccgcccatatgcgtgaaccactggcactatgacgcatttcaggagacgagggggtctctcgcgcatccacaaagtcgtcatcgccatcctcaagactgttcctgcgtgcctgcttttcagctcgggtgaggattcctgcgtaggaaatagttccacccgtggttgggactacatagaatgactctgctgggttgccgggacctgccccagagccgtcccgaatcgaccgcaatgcggctcgagagaagagcttgttcacgtcaggctcgcccgcagtcatggaccggtctagaacagcatgctcacggtctagtttcacctcagctgaggccttgcgactctgttcagcgcgagctggatcagaccctatttgaatacccgcgaatgccaaaggtccggacaccttggagaccagtcccccgaaggctgagtagaagcggttgaatgcttcatcggcaattgcaggcttatctttcgatccttcagcttcagctgcactaggtacggtttgctgggaatccacctcagtgggactgggtgtcggaggagaccatggttgtctgggtgtagaaaaacgactgtgccgattcttggctggtctgtcacgtagccttgtatcgccggctctagccctcggtggtgtttcggtcatctttgccgcggcatgttgcgatgtaagtgttggcgataccggcgatccacgccggggctgtgatgggattccccgggcggatgctaggttactagcaatagatggtgtatcccgacttggcagacgagtgttgcctaccaatcttggtggtaggtgtgcatcctggttcgcgcttgcactctttgtgccgccagtctcggcggtcggttggatcgctaatgccgaggagccagtagcaggtactgtttccgcagggatcgtggttgggtgttcatgttggaatcggaggatttcggcgagcttcttgtggtgagtttcgagtaaacgtagggtccgtagggcctatgacgcgttagcccagaaccgagcgggggtagatcttcaactcaatcaagactcacctcatggtcggagctgctctgtgcagccgttgcgaattcaccagcagctagatcatgctcctcgctggcagcgactgggttggccttgcgagtctctagcactgcgttccgggcatgagtgtgggcctgagtgcggtcagattatgctgaaaatgaggggatgaggtcttaccaaggccaaaggagctacttccatggtgaatatgatttcactaggagtcaagagataaaaaccaggtgcattcttctgatgggatttttccggggaatgttggagaagtgacgttatgcgcagtgaatgggagtttgatttgacagtgacactacggagtaggtaacaccatgtacgccatatacagatacatgaggtggacgagaggacattcaaaacaaaacaatacttctagatcaacctaaaataaatattctacatttcagactgaaagcagccaaatgtcaagtcacatccacattccagtggagacgcggagagtagacgctgatagctacacggcggtcaagctactcgacggccatcgactcagggggaatgccaggaagaccaagaatagcaggaataatagagaatagagtcatatcatcacgaatgacatacataaaaccaattgaataggagaaaaagcaagtttcagtctcataaggctagtcagttatctacttggcgggtgactaagttgcggagctccaggggatgagcggacgattcagcacttctctctctctctttacttcgatcccgtttatatatggaagttctcgcacatgaaaagaagagaggcagaaagtgttactacatacgcctcatgacaactttcccttgaatctcctggtctccccgcatcaacccccccgattctcattccctctgcattcctccaattatggccgactcttcatcttcaagctttaaaggcgagaacagatcgcgccgctcctggacattatcggcagaatcaagtgcaatcggtagcaacggtcggtcatcccaggagtcgaccctcgagagaccgaaaacccagggtggagaagcagcagatcctaaggctggtcctagtggattctcaaagctactcgatgcgcgtcggaggcggaaagagcataaaaaaaagcagcagaaacaagccgacgagccgccggtgccgactgttgttttggaacaagacctgcatgaaagccggtccaatgaatctcgcgatgggacctccgcagccccgtcgtcgagcacagacagctgggtgccggagaacgagggcaataatctattgacagatgattccgagccggacgggtaagttgaacaaatggccttctcattgtcttggactactcctaaccagctgatctttttggcttcgtttaggcccccgccgctcacctcacatgactcccataccggattctacacctcgtcctccccaatgatcaagacaaaatcggtggataccgcaaatacggaaggatggcatggtgatgccgagtcagctgttagcggctctagtgccaccgggtcagaatcaaacccgggtgatagaatctcccgacgcgcaacatcgggtatggcattggatgtccctacggactcaaatggcaagaaacgcagtccatcccctgggcgacgcctgagaggcgcttccaattcagacaaaaagggtgccagtgacgacgctgaggcttcatcaattaagtctgggagcaacaaaagccgaagtctgttcggaggcagcaggcggggcagtctttcatcaaaacgagcacaggcagcccctgacgacgttccgcctttgcctgcgccaattcgtactgatctaacggaggagaagcctcgtgcgcttgaagcgagccccatgccgaacaccccacctcataccgctattcctgcaccagagacgactgtaacccctccaacaccaactgagcatcgccctctcagtgcacaaatcctatctaacaatgttaccgattcgcccgagcccctacaagaaaattctcccggtgttactatcgtgagcccctctggaaacatgatctctcaccgccgggtgcggtccgcttctgcagctcatggcccaagcaaattgtccaattcagtgtctgcactgacacctcttgaagaaaaaaccccgggggcgaagaatgcaacttcaaaccagcaaagtggcttcttctcctccgtgttttcagttgcgcaaaacgccgccacttccttaagcaacagcatcaacgcacaacagagaaatcgtccaacatttcaacctgttcctgctgatgctgataaatcactcaatgaatccacctcggaggagggcgaaaggacatcggataacggcaagactgaagggagaccatctgctgtagagactcttggggcaggagatctgaacttcagccatctggacattgacgcacgacccggtgagtcaatcacgactgccgacggcgtggtgattacaaagccagtgaaccccgctgacaaccgcaaaaacacagctgtttcccggcgagatgaggaagcggctaaacttgaagacaaacgcgcagcgcgcgctgttcaagtagcatacgaaagaccctcggagctttcattgacgggccctgcggaagacgccctggagattgagtctaacacctcacttccgaaagatagcttaattctgggtgatcaaactcctcccagtggtagtattattgacggtgacctaagcgggggccttgggcgctcaggcagtgtgcgcagtaggcttgcccggcgtcatcggggctcatctggggccacagcctcgacgattggagcgattggcgccaaccccgctgcccttggtgttcccggtatcaattccagtgtgcctcggttgactggcttcgctgttgcgagtaagaagcgcaatcgggactttcaccaattattccggagtgtacctgaagacgattatcttatcgaagattacagctgtgcgttgcaacgtgagatcattcttgccggccgcatttatatttcagaagggcacatctgtttctctagtaacatcctgggatgggtcacgactctagtgatcagcttcgatgaggttgttgctatcgaaaaggaaaacacggccatggtgttccccaatgctattgccattcagacacttcatgcgcgtcacacgttccgcagtttgctcagtcgcgagtccacctatgacctaatggttaatatttggaagatcaaccatcccaccattaagagctctgtgaacggaacccgcgtaacccatggcaccggtgataagacagagaaggtcggggaggacgagagcgagtccgagagcgaggccaccgatgaagatgaaatatacgacgaggacgaggaaggagagaatgccgagagcttctacgagggtggcgacagcgccaacaacagtgcaacatcattgccattgcaaaaaggattaagtcgtaaggcttcgaatctatccacacatgctgccgtgccagtggccggcacaaatggcaatggcgataaaaagaacggagacaagggaacttccaaggacgcgactcctgatttcccaggtccgactacacatgcgcctaccgagtacgtcgaagccaacggacagtacgaaaaagtcatcaaagatgaaataattcctgcgccgctcggcaaagtcttctctttggtttttggcccagcgtcgggcgaatttatgaccaagttccttgccgacaatcagaaatgtggagagctacagttcgagggaacaccgaagggtttgacgatggaaagcccaaccaggaagtactcatacatcaaacctctcaatggctctatcggtccgaggcagaccaaatgtatcagcaccgagaccatagacttattggaccttgaaaaggccgttcttgtcaccctgagcacccaaacacccgatgtgcctagtgggaacgtatttgctaccatgaccaagtacctcttcacatgggctcctggcaaccaaactcgcttcctcatgacttgtactattgagtggtcaggcaagagttggcttaagggtcctattgagaaaggtgcaattgatgggcaaacgacctttggtaatgagctggtcaaagccttgcaggttggtgttgttccccgtgggcgtggcgctggacgaggcaaaggaaagcgcaagaagggcgatgccgcagggcgggagtcgaccgcagctgcttcgttgaaggttactgtggattccaacaccggaaatggggaatcatggggactattcgaaccagtccgcccactcctagagccctttaccagccttctcagtccgctatggactagcaacgtcgctcttctagttatcgcaatcttgttctacatggcgttcttccgatcctcgccgtcgtcgtccatgctttcgtctgatgtcggctttcccggtcacagcttgcctcagaggctggccgcatacgaggagatgtggcgacgcgaagagactgagctctggaattggctggaagaccgggttggcatggacggaatggtatttccaaacgtctaccggtcgcccgagccacacccaagtcgtaggtcatctggagctagtatactcgatgagcgcgagctcgctgcacggcttcgcgaagagaagatcactgaccgtgagatggaccatgccattcgcactacccgccaacatctcgacgtccttgagaagatggtggacaaacgcaaagcccaatgggaagccgatgaaccagtgaagtccgaattgtgatggacatcgatggttgttcctccttgcacataagcccaaccaggctcccccctatcctctctcctttataaacttgtctcttgccagaaaagtcccacaattttccttttccaacaccacacaaaatctatttccttgtctttacaacttgttttattctcatacatttatcggggtgttatcctggagtcgtggtaacaagcagagcttgtccatgctgatattcaccctcctcacattcattttgaacagtccaccgtcattatccgactctccctccccatatccttcgatacaggggcaggttttccttgcatgtacatgagcgccaactatcttgtctttaccggtccacgagctaccggcttctattttcttgttcttattgcttatttttcatctgagcgtactagctacttcttttttttttgtgtttcataggtggcactgtatccctaaaagtttcccatgcagcgtgtttttgctgtttggatatcttttggagtgctaccgtgtgctctcttttctttgcccattgggcttctctgtgaataccttgagctatcgctatgttatttacatattcaatttaggctatgcctgacagccttgtgtgcgttcgtactactagaaagtaaattacttgcttaagcttgagataagctcgaccatatgtccatatcacttaacaagagaggaatatcccgaatgactgcaatagcctggtttataaatatcaatcaaggtatctcgctaagaaatcttcgtttcaatccattttcttgagcacttggtttttttcatacttccctgttgactatgtcacccctttccccttccaatgtttccccttcacttctcactatttcattcttgcacctgagatattagtttccaattgatttacacgcgactctttgagcaactcccgagatgaaatcgatcagacacatcacgacgcgttcgttgactccattccgcggacaactcttcccgatgcctcctcgggaagctcttctaccccaaaacgaattggcctggctcccagaagagaggaagacggcacatgaactgatagagcacccattcctctagagaccgaagaagcctagcaattgatggagtttaggcagagaaatagtacttgatgggctcagatctacgtgcatgatactgactgatatatctcgggaatatattacgatagaggacagttggagaaacagcgcagtcttggatacatgatcaccgaaggaatctaaaatacttaatagatgtatcggaagctgttggaaatcgttagtattgttcttacaagagttggaatcgcatcaagagacatacttcaggttttctcggtccgtcaaatccagaaatgcagtcgcatccagatctctccccgcaagaccaccctccatttgggactggatgcgatcgcgcttttgattttcccagcgcagcaggagaccaaggatactgatcaaaacggcctcgatcaagtgcgagacaatcatggaccagataccgagcgtgtaggtaggtctgtagttcgagttagctccgtggttctaggaataatagaactatcctcgagggaagaacacacgattgatccgttttgtagaagaatggcccggcaatgtttccagtgcagtatcctaggaacagaacagcgttggtgacgactttcttagtatggcctaaattcataatagtattagattttgtgatgttttaatcaaactccgaaaacagatgtcacttaccagccgtgttggccatctgcatactcaaaacaagtacaaacgcagcattgtacggccctgtcaggtaatagcaaatcaagcggcccacactgtgttcgacaggaacaaagcgaagaccaaaggagccggcaaggttaggaatcaggaagatgaggacgaaaacgcatcgtcgattctgaaagcgatcgttgaggtagacgcatgtcaaaatcgagatagcaatgataaaaccgtatggaatctgtttgaaccaggttagctgaagattattttgttatcaaataaaccctacctgcataagggtggtcaccaatgttgagaacccaagccctttaataattatggtgccgaagttcgatataccaccgttaggaacattgcctatgttgatgttagtcgatgcaacgtatctggacatggcacaagtcacatacaaaccacgccaagaatgaagaacatatagagtttgtagtccaggaaagcctccaaaacctgatacggcttgagatgtttattttcgacaccagtctgattttctcgtaaacgctcaacagccatgcggcgttctctcttggtaagaccttttgctgtaacgggtgaatctgggaggaagatgaacatgacaataccccaggtagaacatagtgcaccactaagcaaggtcagcaaaaggacagtttgaatgagcgagagaattagcatacattacgagaaactcgtatttccaagacggcagtgcacctttaagatgaccaattccatagcctagtagcccacccaatgcaataccgaggccgttcgctgtgtaccacagtccaagacgcactggctgttcacgacgggtataccacatgctcgtgatcaacatgaaagccgggtcggagcaggcctcggcggcaccgccaagggctcggagaacagcgagggtctcgaagctgttacatgcagcttgaagcatgaggaagacaccccttgaagaggaatgttagtgtctagttgtattcgagatcagtttaacgaaccacatgaaaatattggcacccagatatttccctaaacacgtatcagatggctatccagtcaaattgccagggagaatcataccgattggaagacgctgcatcagaaaattggtcgggaatgcccatgccaggaaaccaaaatagaagatactgctcagccagctataccgagttccatgtagatcgagatcttcccgaattccaaaaatagcagcatagctcaacgttgtctatttccaaaacgcgtgctattagcacagtttttcggccaaaagggagaaaataggtaaatggtcttgaatcaaagagactgaccttatcaatgtagaagaacgcatagcaaacagccaagtagggcaggatcataaagtcaatcttccacaatagcttcctcgcctccacaggatcgacttcttcgtggagctcgtccgggtcatcgaacagcgccatagccgtgtcgccgtcagcattcttggcagccttaaaattggagtgatcttggttgctttcttcgtgcgtgatagtgggaacttcggcgatattggccttcgagtcaacatcttgggatggaacagggggatcatggttcgccataatggtgttacgttcgtatgatagaaagtgcgtataatataaaatagagagcagaaatcaatgagcctgggctagatggaaatatatataaaatgcaggaccagccgggggttgggacgacacgaaatgtataaagcgataacaataacctcggaatgaccccgagtctcgccccttgattcaagtcaaagctgggacgtcttcgaaaagcagccatttcgtacttccccgcgaattccagaccctaccttgccccaagcggcatagctctcaaggatcatctgcggggaagacccagtacggggcccccacgccgtcgtgtcgcgagctgatctgtcccaaacgtggggaaggtgggtcttggctgacgagtagagcagagtcaaatcgaaagcactgttcagtccatcttaacaagtctggctgaaggccaaagcttgcctggcacaaaggctgctaatgtggtcggcgaaagtccgaggactcggagatgatgccgctggactgatcatttctgaagttgtttacaccgactcatcgctgagcgataatgcaagctcctatggatggcgtccgagcttccatgacagccgaagatgacagttgtgaaagcgagtctcaacggctgaagctgtaaggagtatcatggttcaccgccgcaatgaagatgcttcacttatccatatcgagatgaatttgtaagcaaatagcaatgccccttgctagttagctgggtatgagaccgtatgacatatgattaagagttgagaatttccttctttatacgaagattccgattccggtgtctcaaattagatttcttcccacggaatccgactaagaagttatcgatagtaaaaagaagaaagatttgaattaaattatgagccacaaatcgcacttttgatgggaatgatcttctacgcaaagatactagacggttagtcaactttttgacggggattaccatggccatatgtggctgcagtgtctatcgccggttgaagttcaagaagcgagactgtatcagaaaaaacaatcagtatcacaattacaaatgtagaaccaagatatagaatatatccacttaccgccacgaacaagatgatcaggttggacccaataaacgccgcgaagatgcccagatcccgccatcggttgtcaaaggacatattaaaagccgcatagaactgctctccaaccttgtacgcacagtacttgcaagcctgcgccgcgtcgtcgacgatgtatccgttgccaccgcggtcgaagaatggcttcatgtactcgccacaagtgaggttgtcaggggcattgaacagattcagctccgactctgtgcaaactacatcccgtccctgtagctctgtcacgaccattccgccgatcagacgagtgaatggatctagatcgtacagccatgcacgccagaagcctggcatctgcggcttggggattgcaacaccacagaatagagagaagataatcactaccggtgggttgatctgagacgcaatgaagctgttgggggtcagggctgagatcatctgacccaaagtcacagagaacatctcggtgatgaggattatgaagaactggtagccggaccggctggactcggtctggaaccctgggatgtagtacaaggggaggaaaaagcagacggcgcacaagacgctgtatgggatttcggcgaccaccattgacagtgaaaaggcaaattggctgtaggtttttgatgctgactcgcggtagaagatcagacgcgccatatcgtaccggggttgaaccatttggagaataattgctggtagcaccgtaacgttgaatataacgaaaatgcggtattgcagcgaggaacgagagtcatcgagattcaagaatacaagacccgtgatgatagaaattacaacatgggtgtaaagcctggtgaagccatagttcttcgagcgccagaatgatagatgtgttcgccgaccgacgactttgatctggtgccagagaggtgaagcgtattctctatcgaccttcttctcgtcctgattatcccgcacggcctgcgcacgctcttgcttgatctgaatgatttcctctttgacttgatccagttcaggagaagtgcgccaaatgtcgccccagtcacggtctccgatccgacgtgtttggccagcgccgatggcatcaagcatccactcggccgggttagcatccgtggggcaatcggcaccattgcgacggaagtaatccagcagaatctgggagtcatggccgatatcaccgtggtagatgcattcacctcctctttggagtaggagcagacgatcaaagctttcgaatagggcggaattgggctggtggatggtgcagagaatagcctgtcctgctgctgctagcttccgaaggaaacgaacaatgttccaggcagattggccatccagaccagaggtaggctcgtccaaaaataaaagcagttcaggcttcgctgccagttcgacgccaattgtgactcgctttctttcttcgactgagagaccagtttcaggtgttccgatgattgcatctgccaggttctctagctccaagagagtgaggatttcttctacgtaagcgtacttttccgattggggggtctcgaatggctggcgcagatccgccgagaaacgtagtgcttctcgtaccgtctgcatgtcttcgtgaatgtcaagttgctctgcgtaagatgtacctctttggaacgaggtgcctggaggtttgccatcgacgaaaatatcaccagttaccacaccgatgttctttcttgcagccaaaacatccaacagcgttgtctttcctgcaccggatgctcccatgagtgccgtcaactttccaggctggacatagccgtagacagagttcagaagacgtcgggtacctgagggcacaggaacttcgtaagagaggtcttcccaggtgaacacggacttggaggtaatattgaggtttgatcctgcatcagactgaagagtctttgcttgtctgcttgctttcctctgcatcaaagcctcatttagctctttgcgctcggcgttctctttctggtagaaagtgatggtcttgccgcctgcaccgaattgcagtgtttctccaaaatataagtttgaaatgaggaaaccaacaatcagagcaatcatgatgccaaagtttcgccaaagatcaccattcagataactgaagctttgcgcgatgtagttggagcccgagatgattgctgacccagggtcgcctcccactagagtacaggcctggtgtgcaatgtcggtataaccagctccagctggcacgagtgagtctttggtacatgtcagagtaaggtgcctaaattcgttgaccatcaatgcagcgaatccgagaccaaaggggttgatgaagtaaatccatcgcagccacacctgagcgccagaccactgaataagatatccggacgtcaaaacgaagaatgtaataatgacggatgcaaacttgatggcataatcgaagtcaggacatagacatcccacggttcggaagaagactgtcatagtcacatagccctcaaggataatcaaaacaaatataaagaacgccccagcatcaagaaccagtccgcacatgaagtaaacgatgatactgaatacgaggatcctcgcgatggcaaatgcagtgtcaacgataatctgtgcaataaaaagtgcgcttggtcggtagaatgtgaatgaacggtgcttgttgacaattgagcggcccatcattgtggctgcaagttccgagaacgcctggaagccattgaacagcagactgatgaatagaagacctcctcgagtaaaagcaccggcactggtcttgggttgattgagccatacagtacccaatatgatggcaatgccaacagaggtaacccaggagacggtcaatgcaaacttgtcttgccatttaaggaggaactgccgttgcatcaaagcccaggtttgtaggtggaaaggaatcgagtatacagatgattcagaggtaaacttgcgctttgcctctttattagcaatctcgaaatcatcgtagattttcttttccttctgaatctgggcgcggtaggattccatttcttggtctagtctttcactgaagacggatttgtcaaaggcttcgaccagcgcttgtggtgtagatggcacatcgtcggcacttcttccatctttgaactccctctcgaaaggatcggtgcatcctgtcaagtagtcgggcgtggtttgacgaggcttttcgcggaagccgaggccttcgaaatatgatcgtgcttcggatgcaggaccgaagaatacttgacggccattgtcaatcaccaggaccttgtcaaactgtttatagatgttctcggacgcttggtagagtgacacgaaggttgttgctttgtatatgttggtcaaaattcgtagggacttggcgaaatcgagggcagtcgaggcatccagaccacgggtgctgttatcccaagccaatacagtcgcagaggtgatcatcatttctgcaatcgacacgcgacgccgctcacctattctaattagcgtcaattgcgatgaggctgcacacctaaaatggattgcttacctccagatacaccacggataaactggttgccaatcacggtgttggcagtgtgctcaatattgaacattttcagaagcagattggtcactttctctttgaactcagctttcgacacaccaaatgggcgctttccaggggtcttcgtgtcgagggcgaatccaagggtttgtttcacagtcaaggtgggttgatgaacatcatcctcttgattgtatacggcttctccgcggaatcttttggagaacgaatccgcgtcgaaaggaccatagagcacctccccatctaccccggtgtatccaaaccgctggttcgcgatcactttgaggaaagtcgtacagcctgatccgggacgcccaaggaccaagaccatctcaccaggccgtgtgagaccccggaaaccttccaatatgttgtactcctggcctttctttctccaaccgaagaggtcaattagtgttccgggtacattgagaaaatcgatgattgcatctgggaatgttttgatgtatgtcttgacgccgcccattccacgaactgacaggttattccagattacacctaggaagacagtcagtacttgtttatcctccctatgttgagtgtcttcggaccgatatgcttgtctttgatgccagcctcctcggaagcgacacgatcgccacggagagtggtctccaggtcccatgaatcatccgacgtagttgaaccctcatctttctcgatatcttcagtggtgactcccgtcttggatgctcgggattcttgtctagataatctgtgggctcggtgcgatatgctggagaattgtctgctcaaatcagaaaagtccttctcggcggtcataacatcgacacccgtctggatcgggatatcggccggggtgttggcgatgcgaatttcttccagctggcgtccatagctgtttgaatccaggatacctcattattcgccccccaaagcccaaacaaatgtgggggcaagcctccacggacggcatattccgcggtggagtgaccagatttgaagatgccaagcagacgggctcctaaacggggaaaagcgtgcaatcccagtcgatatgactcgtgatgagtcgtgatcactctgcagatgattacaaattcaatcatatcgtgcaggaaatctcgttctagagcaaacagcgaagagcacggatcgtttatcgacctactgttgtggagaagtaccaattagtgccctccactttacggggtataggcaaagacaacgtacaaagtacggagtacatatcattgaacatggatagaccctgcatagtacatctatgttccatatcgtgttgcgtatgatccgttcatagcggatacaaactcgcatatctccctatattgtactccgtatacatgcttatgcttggcaggaccatcaaagtttagacttccatttacttggacttaataactaaagcctcgaatactccgtagttgctagttagttatcttgcctctttgcaaaacaagaagacagtcgcaaatttattcctacgcgtcgcgccagcacccatctagttagctccgggatatctccgggtgaccgttagtttctcctgtctactccatagaaggccaacatttcaagaatctgacacgtttaaccttagataacccactttgctcatttataggcgaaacacaatccatgtctttattgggtagcatccacgtgcaggagatgcgccgccttgcatattcggagtttcgcgaccaatcaatgttcttgatgtttccgcaaaattacccgcagacatctcataaactggatttccaacggttcgagattttcctaatttgttgccgcttgaagtcctgttcactaagcgcatagcctaaaactaaaagaaaggccgaaagcaatcacgtgataggtggatactgattactaattatcaatctatttctcccgtgatccatggatccgtggagactagcgctagtgactaaaactttatttgttttgaacctatgtcgtaccctgtacagagtacaacagagtacaccttctcatacttgctcaagcgtagatcatggtatggcaacgggcgacaactccggcgccgatcaataaattcgccatccaaaactgcgggtccccgagatcgaccttaactccggccatccaccatgttcttggcaatctgcatcgccaccagagaccatatgtacagtacatactcatgcgcatcgcattgcgtgattgatttgagagatagaaaacaattcccttgaagccttgtccatggccctgggaattatcagcgtcatctgcagcagtctgcttatgaaaacttggccgcctgatatcagtatgaaaatgtagatgtttgaatgtgcgtgtgtatgaagaggttcaatcttccagttagactctaggtataccctatgaagatcgatcttgtaggtagagcattaaagaggaaagaggatccactcttgatgatcgaagcgaccttctacacagagtgattctcgcgaagtagatcattcaatggcctttacatacaatgttgtacaccataatctgctgaacaaaatccgcgccctattggtattgattccatcatagtagtaaaggggagggaaaaaatagcattcttcatcccgatcccgagaccatcgcccatcaatggcagctgtgatgccccttgccatcgacctttgcccactgattcatttgctcccaagccgacaaaccgacacagatcgcaatccgccataccattctacgactgagtccctcgcgccacacaccccagataagggtcagaatagaaaccgccagaaaagcatttcgcagtttctcgacgccagcagtggccaccgaacccgcaaagagaaaatcgaggacagcctagaaacttagtatatgcattcaataccatagtgacatgggaaatgacatactggtagccaacaacacgaagatgaaagcaatgcggagccttccggtagatatttaacgattaactgaaaaggtcttcgcagaagggagccgtcatggtctgggctagacttgcacgtggaattttcggagggtttttctgtggagcaatcgctgcatgacattttgaatatatatagaaaaaatggtctgggagaaaatgaaaccaggttatgaagctagactgtgatttgtatatatattgtcgcgggattttcgcgtcgtcggagaatgccccacagcccctggctttaccatactgcaaacaagtcaaaatacacctaattgggatgagcgctcggttggtaattcgtatttcttggcggttatacagattataaacgtgaggagtcagcccatactatatgtacaacagtgagtgtggttcccaagctttgtcctagaattctggtcttttgctctagcgcagcggaaggtggcacgtgacaataaagtcatctttcttctttatctgggtcctccgggagtaggtgctttctaagcgaatccaaagggcttgttaagtgcttcgctaaccacgtattagaatgccctactaaccggggcacctgccattacctgaagtatttcgacgtttctaggctcaagaagcataaggagcgggttgatcggcttgagaagtaggaagggagtttaactactagttttgacgtaaatacaattccccgggtattagttgacacggtgagcgggcccttattgaaccgtcattttgccagctggccgcttttaccgccttctttaccttactacacctccttagcaagaccatcgacccttcacacttgacgtttcaccatgacgacctcaaaaacacccgactcgtttcaagcgcacaaggccaggaagcgccttgatcaattttccaccgacttggaaacggccataaaccatgcgacaaaattcaaaccttatcgaaagacagctgtaatcgcctttcactgggagaatgatgatataggggtcgagcctcgagagagagaactcctagacgtcttcaaatctgtttatggatttgagaccgagagtttcacgattccgcttatcgagtcccagttcaaacttctagaacgtcttgtttcctggtcacgacgaagttctggagaagatacgctccggatttttgtttactcagggcatgcggggtttgctggaacagtggccagtcgctgggacttggcgtgagttataccctatctttaattctactaatgtatcccagctaacaaataatagcggcaaatgcgatcagtataccggtaacctgcaaggtcctaacctcaactggtgggaaattcgtggctacctcgaacaatacacgggcgaagtttgttatctttttgattgttgctccggaggatcaggggccttaagcgcgtaccacggcgcagagtttatagcagcctctacctgggatcagacagcagtgttgaatgtccatttctccttcacccgaattctcatcgacgagctccatcagttaaacggtcaggctgagacgctggctagtatctatgcccgaattttccgctacacacagcagaatcagattggggctgcaccaatccatatccctaaaccgaattcgccaagcgtgactatcggttgtaatcgctcaaggccggtcacaagaagcgtcgaccgagagtcttacagggtgctacttagcatcaaagtccgggaagagattcccctagatttcacccaatggaaagaatggcttactcgcaatattcctgctaacgttttgtccactaatgtcactgtcgaaggagcatttcgaggctctagtctccttcttttcacggttcctatcgagatctggactatgatgccggctgatgacccatcctacacatttattggacacgttacgtctcataatctcctgtcccaacgaccgactcaaacaagcacactaacaagcacactaccaatgcactctggcgctccatctggaagagaaaaccagccaccgcgaagccccaacagaaagccgttcggtagtcctaagcgttgaccatctcgttgaacaggcttggattgtgatttgccattccctccccccccctttgctttgtcttgacttgcttttccttattttcgaacctggataatgagttctactctactcaaaatggaatttttctttcttataattcttcttgaaaaggatccttcccaagcgagctgcgcagcgcagaacatatagtaaaatcgataaattataacatggtattttaacaaccaacgctttcattactgtccgatagcaattgataagcatttatagtatcatatatcagttttgaagaaatcgaaaacttgcattgttatggtatcgaaaaatacatcgctgaaccctagaaatatatatttctcagtcactactcattaatcactttattgaatccctccaaatcctcataagtggatggatgtgctccactccgaggttttcaatggctactagtaaacctggacaaagcgcagagcgtctatgccaaaaccgccttaatctgtgcctcaagtttcttcatgtcaccgccaacaacgcgattcacctccttgccgtccttgaaaatgacaaaggtgggcatagcgttcacgctcagttcccgcgcaacaccttgcagcttgtccacatccacctggataaaacgaacgttttcgtactgctcgctcagtttgccgacaacgggagcgacggccttgcagggtccacaccaggttgcgaagaagtcaacgacgacggggccggaggaagtgagggctttgaagatgacttggctggacggagattaggatggaataaattgcgagcagaatcaagagttacttacttgtcgatctcggtgacctttccgtgagacatgatggcggctgggctcgatttgcgtgacttaaagaagagacggacagcttgtgaggggttagtgtttggttgtttgtttctgttggaagtggtcgaaagctattggtggacgaaggtttggatcataggagatagtgcgtggcagtacttaccaatgtatatcgcagtgaggattagaacggtcttgagctccatcttcagatgtcggcggttctcaaggtctttggtggagcgtcgtgctatttagcgcagcacgtgacctgaaactatgccctatctagaggtacgtgatcacgacatttgaggggcaatgatgaggtctcaagtaccttgggggcatataagtgtcttactccgatcatgccaaatctgggcattggaaacttggcgagtttaatataacggcagccaccaataagcctcgctatctaccggacaaatagcgtgtgatgcgcttgctttttcacgtactattttcgaaggtctagaagcaaagctatgtacttgatacattccctttaaagctaattggtataaaatcttgctatatgtaatatctcgtcgacaaagacaagggtaatgaatatcaaaaagaagcggacccgggccagcataccagactatcttgattgcaggtttcgccacggtaatgcatccctatagtatccctcacgggccgagccataaagagctttgttatttcgcattttcgggggcgtgatccgttcttcattcttgcgaacaagaatagtcggccgcttatacgtctttttgggagtcttttatagctatttccacattatttgttatagctagaatgctagctgtgaaaacgactcaaaggaacaagacaaatttcccatgcacaagctttgataaggccttcggttgagtggaaggcaaattctcaaaatattacccgactttataaaaactcttgcatgatgcttaatatgtaggagcaacattagtttcggtacaggataaatctaattattattaagctcaagaagagtcgatgatccttgatcagcctcccaacgcgaggatcttgaactttggaatgttttcggtctgtaaattctccgactggcttagattgctgtagtttatgttatctcttcgttttttatcaggccttcgggctgtgaactagcaagcccccaatcaaaaaacatgtctcacattctttctaaaagctgtatatgtatgtttcggctctggaatgtagcataggagcgaaggtttcatatatactccggagtccgccgtcggtccatatattcatcgtgaatagccacaaactgaaggagcaagcaataacccccttctatacactcaaacctacttggcatggatttgcgacacgaaattccgaaaatagagcctgggttgagctctaatgacacactcaccgattccattacccgaaacattaccacaaaaaatgctccaagcacgaccggatcgatgctgcgtctttcattatgggtctcgtttgccgcatggatctcgaacttcgacaacggctacgccggtacggtgctgatcatgccgtcctacaaacacgcctttggaagctgcgtgcaagttatagacccgaatacgtatgccgaaattcgacattgctcattgacgccactacaacaatctcttatcagcctcaacttcttgttcgttgccattggaggtgcgattgcgggcatgaccggccgatacttcgggcgcagggggtcaatccaagctggatgtacattggctattatcggtgctgctggaatgcttggcaccagcggaagcttcttgcgctacatggtgtgcagatcgatcagtgctgtgggagttggacagttgattgtatccagcgtcacttatggttctgagtgcattgtcgccaacaagcgcggcctgtccttagggttgtataatgttggacttgccggaggaaatcttgctgcttccgcggtgtgtgcaggttctgctcgtctagaggcaaccaatgactggcagtggaagacacccattttatgccaaatacccttgggggttattctcggcgctgggattttgatgcttcccgagtcgccgcgctggcttatgatacacggtcgagaggaggaggcacgcagctcattcggcgtgctatactgccaaagtccatattcgccggaaatcaccatgcagattgatgatataagaaccaaccttgcaatcgagcgtgcaagcctcaaatctgtctcatgctttgatatctatcgcaggaagcatatcagccgtaccttgatatctgctatgatcatgattggaatcgccattactggtatccaatttgtacaaccatacgctgcactgttcctcaaaggagttggcatcagtgacccatatttgatcaatgttatcatcggcttgtgcatcctaggaggatcattttttggtccgttcattgtggaatatggcggaagaagaattgccatgctttccggctatattgtcatggctgtctgcatgctcactctttcctctgtgagcaccgctcttggaatggatacaagtgcagagatagttatcgtcgttcttctgtgtttgtgggcttttgtccttggtgggactattgctgcgagtgctaacctatcttctgtggagatgcacagcgtctcactccgcacttacggacaagccaacacaacagtgttctatggtatctttgcctttggtgcaacattttggacgccttacatgttaggtgcgggttatggggacatgggtcccaacgtgggctatttttatgcaggtgtcaccgtcgtcatcgctattttaacattcttgctcgtgccagagactgctggaattacactggaacagattgacgaaggttttgactcgggaataaaggcatggaaaacgtcactacccaagaatagagctattgcttcctctcagaaacgaagtatggcaggtggacacgttggagcttgatgaatgcttctgaagcgtggtcagttggctctgaatgtcataaaatttataaattatagtatatatagctcgggattatcaggtttgactctaagctctaaacttgcaacatcaacttccgatggatagatgatagggaattacctacctaaagtgcagagaagccaaatatcacgcagtacgcctcgaaccgcaatgatcacctaatatatatatatatatcggatctctgtccttttcgcggtttcattgatcccacctgaataatttcaatatttgacgcttttctcattgatacccatttctagtagtgcaaatatacacaagtttcacctttgctttggtctgttgaactaattgtaccgaagtgtccacataccttcccccgcctcccgccctgcgcgccccgccgcnnnnnnnnnnnnnnnnnnnnnnnnnnnnnnnnnnnnnnnnnnnnnnnnnnnnnnnnnnnnnnnnnnnnnnnnnnnnnnnnnnnnnnnnnnnnnnnnnngcgggtgcggggggggggggaccggggggggggataaaccttaactaagcggctcggcagcctccgcaaaccccgaacgaactacactaccttttttatttctcaaatcaggcgttgcgaattccgacaggtcattatggctcttacaaataaatattaatgtgtagtcacagcaacttttctcaccaaatgaattacgacgcgctgcgagctgtgagttccatcacatggctttcagcattcgcatactgatgatattagtgtgacctttgcttctcgagaaaggttgaagaagttcatcgagtgtattcactgcctagagactgatgctttcttgataggttcgctgtgataaacaactacattgtgcaaattgtaccgatgcaggcgttgagtgcagtcgtacaagagctcgacgacctcgccggcaatcaccatcggtgtatgttttcatatgacgctatttcgatctatgcttactatatgaaatagcatatctgctctcggggaaagattgttaacattggaaagaacagtttcagagtatgattaccattcttctttacttcaatgcttctgttgattgaccatttaggggcattgaaaatagaattccatcaaatgttactgatcattacgatggaaatatgccgtcgaaaaaaaggagattagagcatgcctcgccaatagaaggcactccgcaacctacccagaatgaatgtgccattggctcagccacacaccttgcagagaaggcaagaatcgttatacaaggagagcttgatggaaatgagtgcatggaccgtgaacgaaaggcgattctcagatctgccctgcagtttgtggatgttacggggcagaggagaagctcaattaccgacaaattttcgccattagaagtgtcgcatgaagattttcatgatggtccatttattgctccatcaccagagctgctttacatgcttcttccgggtataaaaagccatctgaatttcaaatacatacactaataataatacagagccaacagctaccatcggacgttctagttccgtacaatggccggaccacatctcggataaaacattggagaagatggcttcaaccattctcagtgacaatgaccttgagcatgggcaggaattctaccagtactgtatatgtgtttacgtgaaagccatatttcatcttttccaaaagccgagagcatatatggatccccgcatcaacgcacaatttctgaagtccaagaaactatatgaaacatatgccttccgtgctctcaagaggctcaatttcttgaatgccccaactcttcctctcattcagtcgttgatatctgccgtatgttatcgtgcttccttatacgaaaagtcacttattgataactattgaacaggcatttttcatgcagtatcttggcaacatgagtcaatcctggattttcaactcatatgctgctcgtttgataactgctctgggttatcatgaaattcgcaatccgcctgggatgtcaaacctcaatgaagatatctatagtgctgtatgctggtgcttttaccttgaccgaactctgagcacccttctttaccgaccattgtcgctgcccgagccctgcatctctcctgcaaatctgattagcgccgaccaaaatttgccacatatcccattaatacgaattctgttcgatctagctcaggtccaaggagagctgttgaattgcggaaatgcagataacactcgccagataatcgccaatcattcaagacttcaggaacgaatggaggtcatatattcaagattacaatcagtgagtttgactaaatgtctgccttccttcaagctaacttcttgttttagagtcgagtcacagcccctgactgtatctctgcagattggatctcaggcgaattttgctattacgccattctggttgatatccttcgatcgcgcttaaaatgtgcattttctcctttgacacacaaggaatgtgtatcatattctcgcaaatctctcagagcactgcatcatcttcagaaaaatctcgcggatgttccaggcttcgtggatccttatccctcattcctgacatggttagttggtctagtttcagggttataagttcttccactgatatttcctcaggactgtccttctatacccattcagtccattcttcgttctcttttgcaacatcattggagaattagacatggatgactacaatctaatgcaagaaatcacacaaagtctatctcagttcgccgcaagtccatacatctcaaaactgctgaaacttctgtactacttgcagaatctctgcgtaccattgatccaagccaagcagcgtatgggcccgcaggtcaaagttcctacattgtacccttcgatggctgggacctggcatgtgggcgatccagctagtgatgaacattcacatctcttgatgtctagctctccatatgtggatcctgtcgctgaaacaaaccttcaacaactacaaacaaccagtgatggaagctatgcacctgatgatgcgttgatgtggcaattattcaatagccaaatctcgctggagtggttcgagtctaaccctttttcttattgagaatactcgaaacttctcatttccttgtttatatatagaaaagttgtctgtacgatttatgcttttaattttatatacatctaaaacttaaaaaaaagaataccaaataaataaatgacctcatgcggccggctattcttatttctaatcctttgatttctttgcctttttgtttcacgactgcttgttacttgcttgtctgtttctgttcagattttgggcgcatactataacaatattggcatgctattgccctaaccaatctaggttttccctaaatctctagagttattttggcgaaaatctactgtttcccaactccagtcattttatatgtactagttagttgtggatgcgtacataatagtggggccaatatggctcagcctctcagcctcagcctcaagtgtggctgattattcacagtcttagactgaaggcctattacctgttaggtagttatgacagtttcatgagacgcagttgtgatgctaagccttcttatgactcaatcgcaaacagagggcatttacctaggtacataatacataatatataatgtatgggagccattgtcggggaagaatctataccaatctgaagacatctatatatgtctcacttatagataacacattacacattcaagtaatattggaaatattcgcagacaaccgtggacatccaccatttaatatcattccaacaacctcggaataccagcggacatagtgcaggtcgtggcaggtgaaccccgttggcggtggagacagtgcctttagcgtgggcgcagctgattccaacacacctcaaatcttacccccctcaaaacaacctcctagttttgcatctttactagacttggtttctcttttaccaagactagtatatcgcgctctacggtttcattggggatgcccagagtcagctcttcggcagcgtgttactggcccgcgtggtcgttcccctcattcttgaaatcagtctgatttgctctggactagtcactcgttttgccattcacttgagtgcccaagacttcaccccacggtcctactaaacaatctctcgcgcaattctgggcgcgtcgagtagagccgagccgagtcgacatctggtcggacccctccgaaatcatgtcgcaatatccaaacggtcaacaggcatactatggccaatctacaaacccccaagcccctactcaaccatccaccggccactatgacaattatacccccgcgccggacagacatctgcctcgaaggatgccgagttacaatgccggggatgattctggattcttcaaccctgtccagacccagaatatgagagcgaccgaagaaaacagccagtatgcagcacaaggcggtggttatggtggcagcgcgggacagggtggctacaatgatgtgcagagagcccctgaagacgacagagactcgagatattcgcggacttcctcagacgccatgtcgcgtatgtctccgagtcgggcctcttcgcaaacctccactatgtcttatcaataccaatactctggagcaccctcgtcccagacggcctacaacccgcagcaatacggccttccacacacgcagtcgcaaccggttctcgcttataacccccagacgtacactggctccagcaatgcttcatacgccggtcccgccttgggccatcaaccatataatcctgcggcataccagtctaccgcaatgtcgggaatgagctctccggttctacctagaaggcagagcgcagcttcacactacgggcagacaccgccgactccacaatcgtatggcttttcccaacaatcaccgcttccaccgccaaggggcgccgatcatccgtatggaggacgtccgtaccaacccatgtcaccggtcacctcgccttcctatgttccctcaagctccccgggcataatgcatatgcctccgcctacatcacgttcttattacagcaacccacaaggggcgtcgtatgatctgccatctcctcggtataccccagcgatcccaagcggttccttcgaagagcagcctccggcgcctccagttcatcagactcaagcaaatggcttgtacggcaagcggccaagtgtagcagggcgaaccctgccgacgccccctgtgcagctagacttgcctcaacatccgaggcgaactgagacgttgactcgacacccccagtcccggcctcttcctggacccccagtcgatgaagctgggctagatggcaatcgttggccagcggaacctcctatggcatatgaaaatgtgctcagagaagatgaggactctcagaacttttcccgtcacggctctagagcatcccatgctagctcccattcacgcatgcagttcttgccggatgaggaacaaacccacaccaacggtaatatagagacagacactggtcatatgataaatgacgatgcctacagtgaggaaagcgacccagaggctgctgctggtttgattatgttgcaagaagacatagcgcgtgaggaacgtgagaaagggcggatgcgacgtgagaccaatgcgtcagttctcagctcacgtggatccaacatatcgccaagagagccttcaccgcactctgattcacttggagataacgagttcatcggccatgacctttcgcaggacgaagggggctaccaagcaaacgtgcactacggtatttacagttcggaagagtattcggaccctgccgcgggcgacagattcccaggcacctctggttcattcagaagctccgggtcccccgatgagcgtggggagtattataatgattacgagcacccgcctattgcatatgattatgccaggcgcctccatcatttgccggccgatgccagggtagatgccagtggtactgggggattatcggcaccggatgcctattcccgacggatgagctttgactatggcgatgaaggagaatcaccatatgatcacacccattctggagatcaatccgatgacgaaagcgcccaccgatccgcacacgaagatctgttcttccaccctggaatgcgtccattgccaccagcacctgtagagcctgctggtaatgttgatcttgtgtcacatctgatgcctgcgggcacatataaccgccactcggagcagcaagatgacttggacagctattcacagtataacaaccccgccttactgaactctgcggattcttatggcgaggctttgctaaaccagtcccaagttccgcggtcgtcatctttgtcagctcccattgggcctcgtactgatgcacccatcagatcgaagaccgacgcggaccggctcagatacaggcagcagcagcaagaacttctcttgcagcttcagcacaaggacctgcctcatatcgacccagcggcagcagctatgacgctggatctgccaagcatcccggctggccggcgcaagagattccatcctgcaaagctgtcatcggaacaattcaagaagtgtaccgagccgtgggctttgagctctctcttgtcctggattaaagatctgagtgaggatgaaacagatctcagagagcaagcaattgccgatgccatggttgcgttattcactcacaaagtccccaccatgaatattgctgatgccgagacactggctgctcgagttgtgagtggcatgcttgaagaaggtgcattggtaaaagaagaagaatgggtcaagtttggctcaggcactctttcgggtatcctgttccagatcactggcactggatgttactctcccaggctccacttacatgagatgcacattgagggtactgatagcttcggtcgatgctactctcatcactgtatgcgaacattgaagaaggtcaacctcaaggcacagatgatggcaccgcagaagaaaatcgaggactgggtcactttctacaaggtccccaaggaggtctgggaagctcatccgaggaaagaggtcgatcgacagaacaatctgcacgaaattgtcactacagaagactcctacatttcacaactggatgtcctacgagaactatatcgtgatcaattggctaagatgaatcctcccatcattccggtgaagcgattacccaaattcttggccgacgtgtttggcaaggttgatgctgtgaagagagtcaacgaggatttcctgttggcccagcttaaataccgccaaaaagaacaagggccttttatctctggattcagtgacatcttccgggaatggattcgcaaagctaagaatgtttacatcgactacgctgcaaccttcccaacggccaactatcttgtacgcaaggaggctgaacgcaacccgcacttcaagcaattcctaaaccaagcccgggaacacaagctatcaagtcgccttagctgggatactttcctcaaagccccgatcaccagaatccagcggtatactcttctgttggcgactgtccacaaaaatatggtcaaggattccgaagaaaaaggaaatttggcacaggccattgaagaaatcaaggtcgttgcgctggagtgtgacaacaaagtgggagagatgaacaagaaggccgacttgatggagttggcgtccaagctgcaattgcggcccgacatgaagaaggaagttgaactcaaccttgaacacttgggtcggcagatcgtctatcgaggcgaactgcaacgtcctggaacccgtacaagattccttgttgatacacatgccatcctgttcgaccattatctcgttcttgctaaggtattcacgatgcgcgaccgggcagtgaagtacgagcgatacgatatctcgaaattgcctatcccaatggatctattgggccttgaaagcaccgacgatgatcccgtggtcaaatcatcggtccggggagtttcgactgtcacaccttcccaagcaggtgctgccagccctcttgcacatacagggtctggtgcttctggaggaaacggtgctcttgacaactcaagggatgacaagattctataccctttcagaatcaagcatctaggcaaaactggaacatatactctctacgccttttcagcgcaaagccgcctggaatggtgccaaaagatcatcgaagcgaagacaaagcatgctgctgctctcttctcgcaaaatgccgagccattccgactgcgcgtgcttgcggacactgcgttcgcatactctgatcatacacccggctctaaaagtgtcaccatcaagggcacccctctccatcgtgcgattgtggaggtcgagaaacaatatgaaagctctaaagctcgccctcctgcgatatgcaagactgcagtcaactgtgccacggtgttccaacagccacctgggcggattatgtgtgcaattggcacggactatggagtttacatgtccgagctcaataaccccaggggttggtacagggctattcccatcacacgggtcacacaagttgctgtctttgaggatttcaatttgctgttgttgattgccgatcggtctttgattgcataccacctcgatgtggtctgtcccgccaatgggaaaacctcccaatcatctcaggattctgcccgacgagcaccgcagaagctgtctggaaatcgtgaagtgggcttctttgccgctggtcgcctgaaggaccgctacttggtcttatacaagaagcgtgagggtttgtcgtctacgttcaaggtatatatattcgcagcaaactcgataaagtaacagcaaactcacatacaaaatttaggttctcgagcccgtcctgcaaaaatcatccacaaataagggccgcctgttctcacgtcgctcgcaaacggagttcttccgcgattacgacgagttctacatccctgccgagacctaccgaattaacatgttccactcctcgcttgccatctcaacccaaaagggcattgaagtcctcacccttgacaagaaactttcatggtctgtcccagattttagctccaacgatactggagatgcacacgataccctccacagcattgccaatcgcatcagcgggctcaagccgctaggcatgttccgtctcagcgagagcgagttcctagtagcttaccagcagtgtgctgtgtacgtcaacaagcacggcgacgtctctcgcagtgtagtcatggagttcgtgggcagcgcacacacagcctgtctctatggcaaattcctaattctcttcaacgacgacttcgtcgaagtccgcaacgcaatgaacggtcgcttacgccaggttattccgggccacaacgtcgtctgcattgacgacggtagcaaggtgcctggctcgctcaacggcaatgcacaagccaacatcggtggctcgatgggtctttcaagcggcttctctggcgcggccaatggctccccgggccccacgggcatgggcaacacggtcaaaatctgcatgcagcatccagagtatgagcgaagccagcttgtcttggaacttgtcgaaaatgaggggcaaaaagactaagtcaataccagtcgaccgttttggggtcgccctgcctcatattttggtctcattttgggtttcatacttctcttggaacttcacccccttaccctttctcttcgctttttcgtacacctttcattcacccctttttcaacatccctttctacttttgagccttttattctccgccgtggttacctttcctctatagagggtggcccgattcttcatgcctatgcttgttttataccctttttcttcctctcttgcgtgtcacacaatgccattatacttctacgtcgaacttctacgtcgaaggttgatggtgattgatcgcttccacccctgggattgttccagtcggctcgatgatcatgctgtacatagaaaacgtcactgcatctcatgacttgacgatttcctgaattcagaacactttagtatcctgggcgactttgcccctacgaatttgattagtggaaacattcaggtctcaaatctatcttttgatttcgacatatttattcgaatcgcaaataccatgtaggatttggtacatgtacgaagagcgctacgtcgaatccacatgtctaataaacaagaaaggttcattctttctaagagatctagaactccaggttccaatccaaggggaaccacgcaaaaagtgaattgaaacatccaatccaagggttgtagtacaaaattgcataacgatccaactaaggattcgggaataagaaaaacagatgagatagcggctaaccgtatatgaaatgagacagtatgcaagaatatcatgagtcaaactcgacgagcttgctgataacctctccatcgcgggccgtggaagaatcaccgctcttagtggaagcagcagagccggagaccttccgaggagcgtgggtggcatcatccttcccgtccaagagagaagttctctcttcctttccgccgccaagcacctcagctccttcaaggaggtcacggtcagcgtcacggacaatgctacgacgttccgggtcggcgccgtatgcgccagcgccccagctggggataccaccggggatggcggtggcagtgttctcacgacggggatagtcatcatcgtcttcatcgtcttcttcttcctcgcggccgtgagcgagatcacgctgcgcctcgtccattcgcttcttgacttcggcggccatgcggattccgtcggagacgatgttgtcgaggacgccgcgcaggcccttgcctggtggcacgatacctcctgaggcgccagcgacgggcgctgagccagcgctgagtccggaggaacggacactgccgatgttggagaaagttgtgagattggacgacattgaggaagatgcggctagagccgcggggtggggggggtcggacagatggaagggttgggggaagtnnnnnnnnnnnnnnnnnnnnnnnnnnnnnnnnnnnnnnnnnnnnnnnnnnnnnnnnnnnnnnnnnnnnnnnnnnnnnnnnnnnnnnnnnnnnnnnnnnnnnnnnnnnnnnnnnnnnnnnnnnnggaggggggggggggggcgggggggtgggggtggtcggacagatggaaggattgggggaagtaggattcaaagaattgctctaggagttcgtcggccaggacaaccattcggaaggtagggagagtgatatgcaggggattattagggtcgagagccgggttggcagactcagatgttgagcggttgtggtcgcgactgtctaatccgacggtggtagacttagctgactggggagctgcgtctggtgctggagagttggtggacttggcatcatcaacatcgatcaaatcttcttcgtcgtcgtcgtcaccaatggcaaatgagtctagcttctcggttgcctctactgttgtatccagcaggtctgcttggtggttctcttggtggctagggtcggcgtattcgaagcaacgacggatgaatgcgctgacgctaccgaggaatttctcgtcagtagtgagcgagttctcaacaaagtcacggtctcccgacaagttcagatcttccacagatggggtggccgtgattgtgccctcgaacccacgccgggagagaaacaacagcgcctcggacatcttgaggatcccctcacgatcaacctggccatttccactgtcatcgtacaggtcgaagaaatagttgatgttattcatgatatcaggggatcctttaaggcgggcaagaccattcaccacattttgaagattcaatccctcctcgggatctgtgccccacttgcggtagaggcgttgcataaactcatggtccgctggctgcctgcggttcgcccacaatgctgattttcctgatggggattctctcctcgagggactaggggagtcagcaaccgcccatttagatgtggcggctaaaaactcccggaaagcatcataatccatatgtgtagggctaggtccaaggccaacacggccaacttcggtgtctgcaggaggggcaagcatggaaaggcgttgggatttcgatttcttcctctcttgccgcctcgcctcttcctcgataactctctggtgctgttcccattggtacagcgtttcatagaagcggtcatatatcgttccaagatcatccacgctcaggcgtttgctctcgggtccaagattgcggatagaagtacgctttgcaaaagtctcgatattctctaagacagcacccttgtgcttttctcgcgtctcggtgatcgtgctgtgagtgatgccagaaaattctttgaaagcaaccaccattaattcctggaatctagtaatagcccgcagcttgggattctccgatctcgggtgggcagattcatccaatcgggaaaaatatgacttcaagacagaaataaatgatccgtcatcttgtgtctcgagaagctcctcgccgttgactcggaggatggcaagaccgacctggaagaggacctttggcccttctaggaaaaacacatccaagacacggaaagcaaagacgagcggcatagagttaatgtagagagaaaggaaccatggcaacgataccacagaaagttgtacgtctgatttggtgaggtgatcccagagaaccggcattgttttctcaactaaagactcaaacaccttttgatcgagtagtgtgccgtacattgtggttgaatagtaaccgggcaggagacggtcacagagcacagagagaaggaaaaaggcctgggcctctgacatatatctggtcaagttagcaaaacgccctcggcaacttgggattctaaacatacatcaacaatgcggcaaccacaatgttcatggcttggcaatatccaatctccgggtcaatccaactgtacgcagtgagaactcgtcgcaagcgtccaatgccttcttcgctctggaatccaggatactctggaagactgcgattcaaatctttctcaatctcatcgatggcaagggattcttgtccctcgaacttggccaatgtctgttggtacagctttggagattgtagacgaaggaacaaagaaccggatgtgagctcccatatttctcctcgtagccgatttggcaaaccaactctgattagcttgtggaaggttggttggcgaaccaaagtagcattccgaccattttctggagaatatcagtcacatgtcggaatatacaatcaaaaaagaatgtctttttacctctgaaatattcgccccaaagtctcatcttactgcgatcgcgcagcttgcgtgcatcaccagggtagcggaaaattagacccagccccgcatccgggggttgacgagtatcagcttcgttcccgtcttgtccctttcctttggcgcctgagagcaaatattccgaataacaatctgagacgacggtccgcaagctgtcaacctccttcattgcctccctcaggcctttttttagtgtgtcacaaaatcgctcgcaggcctgtctgctaccgacaagctgcaatatgaggcgttgaggggcgaaattgggttcttgatgcttattgagcaaaccattccatgttgtcagcgccaaagagaaaacatggctggcgctatgaaggcgttcgacacgtcgtatgcaggatagcgggaggatgaatccattgcctgatggtccagtgccgtgcgtttggccagtccaagtggtcgaggcacttgctgtagcagatggaatgaagctcgtgggctgggttgaaaagcagatgaaacgttcacttagatgcaaacgtccagtgtatgtattcccagcccggtcaaccctgcgagtgccatctccttggtttgacgaggaatttggtagtggtagaacgagatcagcggtgatctcttgaagcgggttctgggaatcagggaggcggaattgttgccggaacaacgatgccttggaggggttatgatcgggcgaggatagggcggaaatgttgaaattggcagggtcaatcaggctctgggccttctgaacgaaggacgaccacggtatcatgttggagagatgagggtgtgaattcgataaccaatgatgtcggaatcaagctcagttaaagacttcgagttcagcagatccgggctaggagtaggaaaaaaagcccgtgcgtagttgaaattggagcttcaaggtcatcgtacaagctaaatcaaccttggccgaggactaggcctgcagaacaagaggattgcgtcgagtgttgttgcggattgataagagggggcgtgatgatgctggtttcacgtgactgtcctcagccttatccataatagcttggcatcacagcattcttcgaaagttatacgtggaaatgtcctctacagtaattattcttttcgccattctagccttagatattatacaatcagcgctgtaggtcagtggctataaggggagggacatctaccagagattcaaagatatcgtacgcagtgtttacatttgtctaactatatataacgagtgtgaagttaatttctagttctataatatgccccactgtgagtagtacaatggtctacgatcctacagtctacagagaagagcctaagaactagagattctcaatttatgaggcttagttgagatgaatataaacactgcacaagaaacacaagtctgagacagaaggacgcaaacatattatgatcggacaaaaatggggaattgaaacacaatccaagcttgacacggaagcaaaaacacacacatttgaaaccaaagaaaaattgagaatagaacaggatttgagaaatcttaatagagtgaaagaaatatagtgaaagaaaatatcggaatcaaacaggatgtaggtgaaatagaacggtgaaatagaacaagaatagcgaacaagagaagatttaggaacagaacaagaaacaagattggaataaaaccaagctcaacgcaatcactagacattgaaaattgactgtgggatagcctagtggtgtcaagagggccttgtaagaaggattgaacatgaagaaaagaaaaagagcctggatcggctagtagcggtcacagggcaaaagacagtggaaaatgaaattccctttgttcttgtcaagtgaccggagctttcagttggcggtggaaaagaagtggagagcccagtatagctggtgattgatggacatgccatgggtcaaacgacagcggaactttgtggatttgtttgtttgtctttgttcgtgtcgatgaccccgagtaagatgggcttagtgcgtgctggcccattggcctggcaaatgagtggaaagcctaggcagtctggcaatgagatagctgagcgttgttgtattttttttttactttgcttgtggttggtcttgttcctgcttgatcttgtttctgtctttatgtagtgaccggtggggggttttttttttttttgttggtattgacctcgtcaagtcaccgttggcgccagagagcttgttgttgtccggagtgtcgttcaagtgaaagatattgaaaggtccaggtagcttgtgatggcctttggtcgaaagacggcttgaaggagtgcattttgtattttcatttgtgtttttgtattttttttgtattttttggttcagtgatccgcgggtttgggctgtccgtggaaggagccgagaaacccccaagtataaaatcgagcactatccaggcaggtcgataatggccttcaaacaagagacagctggcctcgatgggaagatcagtatgtccctttttttttttttttccctcctctttctctttcccttttcgtttttcttctttttttttcttttctttctttagttcttgtcgagcgagcctcggacctgcgaaggctctgtgtattcaggaaggacttcctcggagggactggtcataagaccctgcttttcgcaggcctcgccatcctcccaggcggccttgcgctccgaagaagtggtaccgcggtagcgttgccagaggaaaaccacagcctggccgaccagcatgccaatggcacttgcggtcagtccagccaggacacccaaaacagccgggacaatgataaagtgaacgatacgtgaaaaagtgcgggcgaaagcgccgtggtgcgggtggtgatggtggggacgagcggagccgtgggcgtgggcatgatgaccaccggggccgaacttttcacgcccagaaccctccttcccgaaaggaggcgggggagggtaaggcatatcgtcatggtcttcttcgtggtggcccattatcttgccctcgtgtttgccatggcagcccttgtggccggatttggccatgcccatcacacgagccttggcgccagccaagaggccccgaatgcgagagaccagaagttcttgcaggcatttggccttgccgtggcactccttccaagacaggcgatcggaagcaggggtgttgctttcgatttcagtccgagcgatgaagagctcgccgttgggatcctgtaggacggtgatcgccacagtatcgacagggacggggtgggtttccaggtcgagaacagtgaatcgaatatctaggagttcgtatcccggctcgtcggatggtacggccatcggcatgatttcaagcgcatacccaacaggcatgggggcggagtcctctccctcttcattttgttgcacagcaagaatcgggatgggcggagccggtgggaatatttggcggccgttggccaacaggcggttgtcctcgatcgagaaatccagagtctatgagagtttgttagccagttcgaatgaataaacgcattttgtcattcttaccagagatgatggtttgccctccgtccagataacagcaccttcgtcattggtttcacgaagaggacattcagagcaaggcaggtcaacaatcgcatgacgaacgtcctccagaagcatagggtggatattaacaaatccatcttcaataatatcgactttaggttccatctcggggacgaccagcatggcactggcgccgagagcagcggcgccacccagcaaaagggagcgcacaaacatggcggtggtaggaaatgatgcttaacgcaaaatgaaagtcaaaagcaaggcgatgcttctcttcttgaagttgatgagatgagtagactcaataacgatgtggtgaacaatatctcgagggggtagataagtgcacttatcttctttcagcgggatgtggagtgggtgacgccagctcctgcgtggctcgtgctgtcattggtccactggtggacagtcagcctgctgactgtgcaggcggcatctcccgggcttggacaatcgtgttcttattcgtaggctccagactgaacggcgacataccgaggtatatcgttcccctgatattatttaaaaatgaggatggcgaggactccagtcctatgcctatcgggtatgcattcgaaatcatgataatgtctgtgcgatacattcgcttctagctaccaaaagttggcatgtgctgtggacaaaaacatggtactgtggtatacgttccgaggtgacgaaacacaacctcgatgctagcgtgtgttgctagcgtgtgtttttatccaggcgcgaaatgcgcatagtccgcctggtgaacgtgcaggaggcgcagtttgtaaccgtgccacgcttaggtgtatactgcaatatcatgttttcgagtttctgggagatcatataatgctcccagattccggagctggcggttgttataaattcgcatggtcagcctgctgaacgtgcaggtggcatctgtgctatgttgcctgcccctgggagctcatttaatctccccatctcccagaggctagctgtcattgctgaaattggtttgttcagcgggccaactatgcagatggcacccgagaagcctttgcgcagtccacccatagccgactccagaggtatggctgtcgctggattttgctcctatgccatgatgctagctcctgggagattaatgatgttcccaacccccaggagctggcatgctgttgtttgatgacggcatcggcacggccagcctgctgcacatgtagacagcattagatcgtgttcatgccatattgccagcctgcagaagatcatataacgttgctacctcacacaggctgccttgtcgttgggcgaacaggcttgttcagtaagccgaccgaccatgcagccagctcccgagagatcatacgatgccccccatccctaggagctggcgtactgttgcaaactgcatggtcagctagcgaaacatggagatggcatcatatgccgcgtagccagcccatgggagatgatatgttgttccccgctcccatgagctggcctattgttaacgcgatgttgtcaaccactaggagatcattgatgtcccaatatcctgggggccgacgtgttttgagtgaatcggcgtgtccagcaggccgaccatgcgatcaactcctaggaggtcgtgtaatgttccccattcctaggagctggcgtgttgttgcgaagcgcatggtcagcccgctgaatacttgccatattgccagcccctaggagataaaatgatgttcctcatttttaggagctggcgtgttgtgagtgaattggcgcgttcagcaggctgaccaggcaaccagctcctaggaaatcatataatgtccccatcctaggagctggcatcttataggtgaattggcatgttcagcaggccgaccatacggtcagctcctaggagatcgtacgatccctattcttaggagctggcgtgctgttgcgaagtggtatagttagcctgccgaacatagagatggcataacgtatgccatgctttgccagcccctaggagatcatatagtggtcccatctcctaggggctggcgtcttgtggtgaatgaggttcagcaggctgaccatgcaacagctcctaggaaatcatataaatgtcccccatccctaggagctggtgtgcttttgcaaactgtatggtcagcctgccgaacatggagatgacataacgtatgccatgctttgccagcccctaggagatcatatagtggtctcatctcctggggtccggcgtcttgtgagtgaatttgcgtgttcagcaggccaaccatgcaacagctcctaggaaatcatatactgtccctctcctaggagttggcgtgttgttgcaaagtggcatggccagcctgctgaacatggagatggcataacgtatgccatgctttgccagcccctaggagatgataatggtcagatctcctaggggctggtattttgtggtgaatgagcgtattgggcaggccgaccataccgccagtccccaggagatcatataacgtctccctcctaggagctggcgtgttgttgcaaagtggcatggccagcctgctgaacacggagatggcataacatatgccatgttgccagcccctaagagatggtaatggtcagatctcctaggggctggcgtcttgtggtaattaagtgtattcggcaggccgaccatgccgccagcgccgaggagatcatataaagtctcccttttaggagctggcgtgttgttgcaaattggcatggtcagcctgccgaacatggaaatggcataacgtatgccatgttgccagcccccgggagatataatggtcatctcccagaggctggctaatgttgccgcggcgtgttcagcaggccgaccatataggcggcattttttgtgccatattgccagcccctgggagatcatgtactgtcctccgctcccaagagctggctgttgctgaaggtggcatcgtcagcccgctgaacacgcaggcggtagtctcaatttgtggcgtcacaagtcgtttccatgtgcaggcaaaacgacgccaatcgcacatcttctacctagtttcctgggtagccgaataatatatacccgaatataatatatactcaagggcccagacattgtactcgaacaagacgtctttcgacgacaaaaaaatcacacttcgccccgaagggtgaacaacaaacgaatcgtacatgttgtctttcgacaaccgacacaaacaatcatacaccaccacgaagggtgggcgaacaagaaaatcaaacacaactcagaacaggtaccccgataaaatgccatgggcgtcgacagtgataatcatccatcaccttcccgggtgagagaaacaggggtactcaaacaatggcttcttatttcggtgtcgttggtaacagacacctgtcgctgtaactgtgcaggtgaagtggcaatcatcggacttgccagcttgctgcattgtcttttgcggtcccaagaggtggctcattcgtccctcccctcgggtcgctttcgttgtacttctgcagttgaagcggcaatcatcggacttgccagcttactgccttgctgtggtagtattattcatcaagaggtggctcattcgtccctccccttgatgggatgcgcaccgcaccactttccgttaaccgaacaacgcccgatcgccggcaaaacaacgaaggagaacatagataatccgatcgaagattggaacgtcatatccgtgctcccaacgcagttcctccaggaactgttcaggaccctccaaggcgtagactaggtgtccaaggtgacctgcccacagggggaacgacagcaaaatcaccatcaccatagcaaatacaccaaaggaaagtcgacgagttcctgtccacaaccccctcagcaaagccgacccttcatgcatgtctgactcgtcagacacagtgacggcgggtgggtcggaaggccaagctcctggcatttgaagaccagaaggcgctgctccgcccatttcctcccgctgttctcctgtattctgtcgagcgctgcaatttgaggtttcggcatcctcgaccctcttggtgcctttcgaaacccccgcacgggaatctgtccctgttgcaacggcattctttaccgaagcgtcttcgggactggcgaccagggaaggggtggagatagctcgagaggttgctgtgacctgcaacccctcaggagacgacataatgctaggacgagcttgagtccttgccgcgcgcgcctcaagcaacgcatctaggtgcgagcgagtaactgtccgcgggctcggaacaagttcatcctctgtctgccaagtcagatctgattcattccgagtcggcttagtagcagcaggcacactcggaatgtcctcgactgacgatggctcagtttggactgactcagttggggctggctcactaggagcaggcgcacccacaacttcaccggacaaagtgaacacggatgattcgagcgtagtggactcgggcacagtggactccaaggcagcttgagttggctgggaaacagctggctcgctcatcactgcttcgggatgcacatgcacggtcttgagagtctcatcttcctgcgatgcaacttgagtcggctgagaaacagcgggctcacccaagattgcattgataggaacctgctcggtggcctccaggacaacttgagtcggctgcgaaacagctggcacactcatagctgtctcggtgggcacctgctcggttgagacagtctcggtgtacgccagaacagtctgagttggctgagaaacagctggcacactcatgactgcctgtgtagacacctgctcggcctcaacagactcggtggactccaaggtggtctgagttggctgcgaaacagctggcacactcataactgcctgggtgggcacctcctctgtctggacatgcacaaattgagctggctgcgaaacagctggcacactcatctctggcacattcgcggctgtatgcgtcaacttttgtttcttccgggctggctgtccgtcctcgctggacccaaagatatcagctgtccgtttgagtactcttcgtacagagagatagtcaaccctccgatgcacgcgagggcggccactcccgacgagacgatcccgtcgtttgaagacgcggaagcggtcgcggacccttggcataccaggcttgagagggatggctgccacggcctgcgcgatgacgcgattaagtgatcgcgtcaatgggagagacgggggagcgatagcagcatgaccaccagatgactagctcggagccgccaggtcatctttgttgtacagtgtgatcacatgcgtctgccccttatcccattccatgtgaccgtcaaaggactcgtcgttcaactttgcgacttcggaataaaacagctcgtcgtcgagttccatcatgtcgttcgtctccacttgctgaggagcgatagtcaaggtggtagctagtgcttcttgcaccactaccatttcgtcgcacacctcggcctgcaacatcccagcaatttcttgtcccgtggtctcagtactgatatccacggtctccacctgctggggagcgatggtggcggtggtagctagtgcttcttgcaccactaccatttcgtcgcacacctcggcctgcaacatcccagcaatttcttgtcccgtggtctcagtactgatatccacggtctccagctgctggggagcgatggtggcggtggtagctggtgcttcttgcaccactagattatagtcgcccacctgcgactcatctgcctgcaacatgccggcaagttcttgtcccgtggctgtgtctatgtgtgacccagcccgtgatggtttttgactgatcaatgatctagtatcgtcccggcgcgagcggaagttagcgtgtcacggtccccagcgaatcgatcgagggacgattcgcggacggagagagggaataccagtagaatcatagacatcggggctaaggtcatcacattcgcgatcctcaagggggagcgatctcgggccacgttcttttcccttgtcgagctgctgcgggtgggggtcgaatgcctgcccgtgggagcctggttcctggctttccacgacgtggcggcgcgcaatacccacagggctagccgaggactcggcgctacttgccttccgagtctggacctggcttacccttgtgctttgcatactcgcggcaagcattctatccgcattgtcaaggaggcctttcagtcggtcctccgcacctgcaaggcgtgcctgtcgttgctggtttcggccggccgccgcaaccacctggcaaaggtcccgcaaatctgcctggtccctcgccagcttctccttgcagtcgcggagggcctttttcttgccctccgcttgctccaggtcaacagatacctgctccaggtcgtcctcaataacctggaactggcattctatttgcgaagttctgttggagtttgcctggttgatcatggcctgcatctgctcatgatcgagaagcttggtggtattgcggtcttttgccatttgggatcgcaaagccgacgcctgggacctggcgtcgttcagtgcgttctcctgacgagatattgtcgcttcggcatcagtcagtacttccagcgcgctggcttcaggctgtttctgaggtggtcggataccggagggggattgaagggctgtgtcggggcccaccagaggggaggtcctgtgcggaggactctggggaaagtaggaggggcggtaggtggatgagggacggtagattggtgaaggtgtggccgacgaaggaccaggcaccacctccgtgccaatgggtccattgcggggaggacggtacatggctgtcggggaaagcttgtcaattgacgaaggaccaggcactacctccgcgccaatgggtccactgcgggaaggacggtacatggctgtgggggaaagggtggcaattgacaccgggccaggtaccacctgcgtgccaatggatccattgcgggaggggttggctgaggcgatcagagggatggcgggggtgggggcacccgtcatttggaacccagtgacgctgtcacggcgacggcaggtccgtttctgttggtttgccattgcgagctttggaagatgttagaagagaagctggaaaaggttgcttgtgaaggcaactgtactcacagaaaaggggatgaaatggcgcaggatttggatgagagtctcttctcaaatactatgggataaagtgtcagaaacggcagataggtcacttggaagagtggttgggactaaccagaagaagtacgtggattcacaaactgtttagtctttgcagatgcagacgaatatgaaaaccgagtacgatgtggaagaaagagagaggggaagaaagaaagagaaggtgtgtgggaagggcagaagatatagccctcgacaaacgacgtgactcttgaggcccaggctcctcaatggtcaatggcctgactcaatgactaggtcttgcctccctggaccaatcaacaggcttcctcattgtttgtcaatggcagggtacttcctcaacaatggctattatgacatgttcaataaagagaacaatgggttgtctccttggtgccttgaatggtctttttctaggaataggacgtctcgttcaacaatacaacacattaatcaaacttctgaatttatgtctattcaactgtacattttctagaattagctctgcctagatattgatatatgtagatgctccatgtagttgcggctgaatgtggtcgacttgccgaaggtcagtgcacttggcttactgaatagattggtcttccttggtttgatgaatgtattgcctactctgtgccagttgtgatctataatcaaatcatcgttggaattcctgccaccatggctcttggttgaaagaccggtcttgtccctgttgttctatcatccagaatgataactcgttatcaagagtcgatctgcatgccttggtggtttcctactactctatgatacgaaaatgttgagtttcaagccctcctacaccggaaatcactgctgactggaagatcatttcccccagggccgctcgtgaggtcgtcacctcggtcccacaaagattccgaataggcgcacggtacgggtacgggtacgggccgggcccgtcacaagcaaaaccaggcacatccagcaaccaatcaacaagacgtcgctagcattttacgttgcgtcaaaacagaaagacaaccactagactcagtctacatctccaacaatacccaatggccttgacactcgagttcggcagaaacttgcgacattagatcaagctaaggtacagacacttttcagatgacacttccacgcgagaccttagccgtgcagtgggactttgcaatcatatcaagtgatctttccaagacagtcaaaccgttggtgtggtgtattatagggtcaaggtacgtgtcgtgtctctttcgctgggattacttgaaatattccaaaagatactaaactatgtttacattagattctctatcgaaaaaccgaggatccttcagaccatcgccagctcttacagcaaatatgcggcaatttgtctcacccgccacggaacgaggtacaacctgtcggctcgcccttaatcgtttcaatcctctttagtagcggatcattcagatgaggagagtctgggagctttggaaggtttctacaaatgacgaatgatatttgctgcgagaataagaagagagcaaaaaacgattaacgattcaaatggacaagactcattctcaacactaaagatcgatcgctatctgcaactaatggagtgatttgtctactctatgggttggcgctcatccaaccaaggtgaccggggctcattgataaagacacggactgcaaagaagtcaatgtcgagtatcatccgactcatatatcacgagctttgtcctggatttgggtctagagcatgtttctcctacagtgactgacatattttgctacagatatttctatatttgcttccttgacaatttatatatagagccatgattatataaactaaaataaacattatattgaagaggaacatgcacgatgggcagccttgtcatgcaggcaagacgagaacgacacaacaacaccaagcatccagggcggtcagctagcaagcatagcgaccacatagatcacaccatagtatacgatctcctaatgcacaagcatctcgcaactttcttctcatttccggggtgatgaactgactagactacctgctctctgagactctacttagcaaccgggctctcgcttttctctgcttgaaggataaggccactaagtagggattccgattccctcactgcaatatattgttaggattaatggatcctccggtatgctccggtatactgatctgcatactccgataaaatctactggcctgagaaatcggaacatgaaaacaagtatatatgaacgcgttttaagactactggtcaacctcccggaggaccacatcatagtcggcaaggataataccaccgtgagcagcagcgttccgccgagaccttctggtattgctgataggcttctcagaccatttgtcgagcacaattgaccgcacctcaattgtatgtgcatcgaacgtccgctcatattttatgagggcttttgggcctcttcgaggtctttttgtgtgtcctcgagatctttttttatatctcggatgttctttccttgggtgtcggcccttttctggagatcttggacagcctgtgacggagtcttaagcgtttccagaagggtcgctcactgttcacccatgcttggtgattgtcgttaaacacgaccgggtctggtgacaatgcttatcgcattattgtaactgagtcttcgctcgtaagccttgtcagagtgtgattagcttggccctaggctaattagcgaatatgatactgttactaaaatgaagcgacttgcctcgggtggaaaagctcgctgcaatgcggggatgggatcgactgctgtactgtgcgagatggcggatgaaacgttggaaaatctcttgaattgcgtagagaggaaaaggaaactatccaggtgctgggactaaatagttgttgggagcggagaggtcacatgacctcgaacagatacaatcgggctgagaggatcacgggtagtggatttgtttattggggatttccgtcctttcttctgacatttcggcattttagctgatttctgactcagattgccattagccgtgtaatcaatgatgtgacgtgggtgtacgataaaaatagctttaagatgtgggtacgtctagttgatgtgagttcatcgtcaatagatgctcgataaaccacaactgactagaatatgattgaactaggtcccgagcgtgaggtaatgccaccgcttctctcgccaggcgaccgaagacaatcatctaagctcggttcgtccttacttcgccctcataccgccaggtctcttatatctaggcatataaaatcttcctccaccatatcgttagcattaactgacgtcgtttcgaccgctatacgaactgagatcaaacggctcgctggagattcataccaggtatgtcagtctacagaccctcagatctgccatatgatcggaaaagaagataagtaggtacgtggtactattactactggttcgaatggagtatagctaaccatatttagataggtaacctttggttaaccgcgagcctaatcgacttccaacttgatatcgggacttaagtaagatactgttggttagcatgcgataatagtaaattgcgttgatttagtgaaattaacagcatgaaaaatatcatgaatgaacataatctttatctaccagatccagtgtggttatatttactagtaggttttatccgaaatacaaaggtctgaagaaccccggtgcaatctcatacattgtttcattcgctcaaagcttagacttcttgccagtcacgttgggtacatcatccccggagagcaagaagtccggataagacaaactcccaccggaagcaccgcctgcagacatgcgccagtttgcaccatcgactgtttatgtgtcagttcgcaacattcataatgtccttttgttatttgacaactcaccgacaagtgtttgaccagtgacatagctaccagtgtctgaaaagagatacacggtggcatcagcaatgtcgcggacatgaccaaagcggccgagtggctgggccttggtgtaggcctccagggcatctgatggcagcagacgttccaagccctagtgaatggtaagtcaatcaatttttgacacagtaatggcactgttgagacttatactaacctcggtctgtgcaatagggcccggcgcaatgatgttcgacgtcattccccgaggaccatattcgatggcaacactgtgcgacaacgcatcgataccggccttggcaacggatacatgcgtctggaaaggcataccccgatagtgaatggtagcactgacgaagataattcttccgccagttccaatcggtgatggttgaactggggggttgtcagtgccaatggttaacatatggtgggattcactggacggtgccctcacgagtctttgtatccattctgtgcttggttgccgactcccttagatacggaagagttgccttgagggtattgtaagagcccaagacatcaatatccatgactgacttgaaagcattgaccgagagttgctcgatggaggcgaggaagttaccagcggctccagcactgtcagatactatcagtatgagaatcgaagacacggtcaagttaatatatcgacgtacatgacaaaatcaatgcctccaagttccttgacacaacgctcaactgctttctgcaaatcctcgaacttgcgcacgtccacggaaccgatcccaatcaccttggcaccgggtcggactgtcgcgatgtccttagcgacgcgctcggtcttctctacattgcggccaatgatgcaggcgttggcaccgaggtgtactaaggcccggacttgggcactgcagatagtgccggcgccacctgtgcagaagacgactttgtttgctgggtaagggagttagtgtgggttgtgcggtagcgatggattcggagagcctaccgaagatcccatccttccaggaatcactcaaatattccgtcttgggcagcggcattcttgttactatgtatgtccctggataaattagtttaaagattgtgggggagttgggggaatgttcaggaggtgatttggtgatacccgtttccccacagttacctcggcttcacagttttatgcataaaagattagtgatacaaaaatacaaagctctacaagaattgttgtttaaaccgaagcagttgacaccttgcttgatgaaatgtatgctgagaagacatatttagttcacattccgtgtacatatcttgtctgcctcatcctctagagattcaaggcgcttcatagacagaaatggcacatttccgtgcattgcattgttagtcagcagccacgtgccgtgatgatataagatttaagattcagcctccatctttcagcatcacactagttatggtatagagatgaagttgacgtagtggatgaataatgaacgtgacgattgattgcataattagtgagtactcccccgtcttcgatattcttcttatcacctcattgattatatactttgtcctctactgtccggctgcatccgagatacatgagcatggtataccctagcgaaccaattgtttcaccgttggttggctcaccatttatgcctgtaccacagcaaaataaacagttgtgataattaattgacagtatccagtatataatttatttcctatactagaaggagttccaagtggcagaggttagcttatgtaggagtagacgtcgatctacatctaatatacgactgcctagatagcctagatagaatcttatataaaaaaaagtaaacgctagacaagacttatatcttcactgctttttactgtaataacaacatatagattgccctcattgcgatgaagaacaaccgttctctgattggctgtcacgtaggcggaccgcgacgtcaccgaaaaagaaccacctcttatttgcattgttgacgtgaatcatcgactcgactcgactcatttcagattctgttatatttgccaaatacagctctgagccaagcaattgcctttgttttctgcagtatggcatgccccatcagcgttagcaagtttgttggcactgtctccctcggtcttcttaccgtacgtcaatttcatctatcgcatcataaatacgctctacaaagactaacaacatgtttcgaatctacagggcctctcttactccacatcagccatcacaatcccagctctgcagctccttccaacagcgacaaccgccgcccgctctctgaacgaagtgaagcgcctaacccgccgatatgccctccggctctccttcttgaccaatacctgcttctgtttcgcatggtgcctctcatctccacgccgccgacacccatatatgatttggctatgtgcattctctacaatcggggcccacggtgttgatttctggttccaccgtcacctcggcttcaaaaactgggtgtcggctgtgatccgcgatgtttcccacttctctctgatccgggactcaaatacaagcaaggatgaagaccttgttgtggttgaggccgaggacgacgtgaacggcgaaaccgttcagcgcgagatggaccgggagcgccggctcaaccaagcgcgcacttggttgtctggtattgcactttcgatcggcattgttggtctttggggtgacaagaggtgatttttcttctctttcttctggccacgatggtctttcctcatgatgaacactagttgtggttccatatctattttctaggaaacccctttcgttactgtttctttgatcacgtctaatctgttttacgcctgatacctttcgttccgcccctcttttctcttgcgtatcttttctgtacatcgatgggaaccgctaggaatggagtatcttctgaacttgaattcggcgtatctgagccatatctacagaatcgctaatccgaccacccaagctaaagcctatcatctctcatatgagcctcaacttgactaaaattcgtgggaagttcaaagggagggagaggctgatatggaaattgacattacaatttctttatacaacaatgtaaaatgcagatcggcataagtgaatgtcaagacaatcactccatatagacaaacaagtattacgatctcaagtagatggcgctagactcacatgcaaatcatccttatcctccctttcttaatagtacctaaatccctagataactaaatatttatagccatagtaggcaagtcgaaagtgaacgataaataacagtaatatttgactgtggggcacgcagataacatgtccagaaatataggagataggaagaagaaataagcacagaacataaagtgaacagagtgaaaccagagtgaaaccagagtgaaaccagagtgagggcatgatgagggtaaagtgagagtcaaaggagccgttctcacattaatatatacgttgtacttaggaggggtatattagggtcatattgttataggagcataatgcagcgagatagattatagctaaagagtactaatatcaactctaatttttctaattacgaactacgtatagctataaataccgtcttctccctttcttctttctcttctcttctctcttcctacaatcccctccgtctctgcaacatcttcgccaactggtgctatatactagtaccgtctgtgaactcatatccttcttacttaccactcgtactctactaacatacatgggtataaatagtcacttcttcccttctaccttccacctttcttcttccaccctccatcttccatcttccagtttttgccctccaacatgacgactgaacgtggcaaaccccagtttgtcaggtatctattaacctggatgtggagggtaagaaaaaggccctccaagactgcaaggaaaagctagcgaaggactcgaaagccagaaaccaggctcccacgggcaggcattcgacccccacccgcagcagctcgacaagggaaaagaacgtggcccgagatcgctcccccttgaggatcgcgaatgtgatgaccttagccccgatgtctatgattctactggtattccctctctccgtccgcgaatcgtccctcgatcgattcgctggggaccgtgacacgctaacttccgctcgcgccgggacgatactagatcattgacgagtcaaaaaccatcacgggctaggtcacacatggatacggccacgggacaagagcttgctgggacgttgcaggcagaggtgtgcgacaaaatagtagcggtgcaagaagcatcagctactacccccactatcgctccccagcaagtggagatcaatgaccttagccccgacgttgatgattcccccagcattccttctatcccgaatcgtccctcgatcgattcgccgaggatggtcacgatacactagctcccgtgtgtgccgtgaggatgttatatcattggacagtcacaaatcatctacaaatatatttgatcactagttacatactccgtaattatgccatgtacccctattgtctgactagctatgattaatatcgattagcaagaatatccagggacctagaactaaatcagggcttaagagtcatagccagaccaatgatctgaagaaataaaattaatcccaatacgctaaggagaatggcggagtcgtcggaaatgagccccttggcgcaaaaagaataaaaaggacatggcagtgcagcttgtgttgctgtgaaatagaaaataaattcagatcaaatctataagcttgagaatcatgggcaacttcaccatcgtcaaaaggccaaatctacacgccaggcttggcaatcgtcgatgcgccacaacccaacacgcccctcggaggaggcaagtcaatccgccaaaaatctatcaactcctaactaatttcttagacaacctgcaagtcgcaatcgacgtgtccggcaatggccaattaccatggccggcatcaactcaacccgactcatcgacccacttccacaacatcacactctttttaacatccgagtcgcacaactttaccatctctaacggcacaaagcccgcgtctaacacaagctatatcggtcccattttggacctggagccctcatccacagtcaaacatgtgaattggatttggcccgaatgcctcgtgggagacggctctggctcaaaggactcggcgcgcggggcatacaatatctctatgcaccaatctttccgctggaatgggaccgattattatactctctttgacctgccgatctctgtcaccaacagtatacccaagagtgacgatcggatcgactgcgatctactggaaaacaagcttcttagcgcgacggagatcggcgagagctcggattcgctacctgggcagccgtggattgagggcagagttagcacgacagtatcgagccccgaggcgactcagacagggtcgggtaatcggtgtcattcgggattcaggagaatagctggcattgcgattgccgcgacggctattttacatttcttggtttgaggttcctggatatcatcgggttcatctctattaattatcaattttagcattgtttttgtctttatatcagtacagaaacaaccggcttacttccacgtgcgaccaactatagtgtagattcaaatatggctgtcacaattcgtctattaccgaccaccgaattctactccttctgttcatgatcgtcgtcggtatttctgctttcggaagtatacattctcatgttgattttggaccttggggatatcccttgattgcctagctctctctcccagcaaagtttaatatctccgatcaagggttccttccacatctctagtcaagtatgtcaagaagattagatcgcgcacaccggaattgacaccaacattgacaccaatcttctttccatgccgattttgtccgcctcccgacgagtcctccggtaccgcatcgcccgagccctgctcataatcttcgcaatatggaatcttgccgagatacatctgattcaacaccgaattcacgaagtagatcacgctatcccccgacaccggccgcaaaagcaagaacgaatatatattgcaagcatcaattggaacaatgagctcgtattacgcagtcactggatcaaggcactcacacagctggtcatgaggcttggtccggaaaatgtattcatcagcatctacgaaagcgggagctatgataacacgaaaggcgcgttgagagaactagattgggaactcgagcggatgcgggtaccacgaaatatcactttgtcgcctgtcacacatgaagatgaactagccgcaccggcgaggggtgagggctggattcacacttccaatgggaagaaacaactcagacgagtgccgtatctggcgcggacacggaacttaagcttgctgcctctgcgagatctcgcacgacagggtatcacatttgataaagttctgtttctgaatgatgttgtcttcacggttcgtttcaatcgtcctatcttctgtggaatgtttattctaatgaaagccctcttctgtgattagccgaacgacgttcttgaactcctatatactaataacggcgaatacggcgctgcttgctcgttggatttctctaagcctccgaattattatgacacatttgctctccgggatagcgagggccatgaacccatcatgcagacatggccctatttcagctctgcggtatcgcgacacgccgtgaaaaaattgtctcctgttcctgtaacgagttgttggaatggcatgggtgtgtggacctccactctaggagagttgcatgagctaacgtatatctagtggcaatgcccgcaagtccattcatcgacagcccaccacttcgtttccgaggcatccctgattcactggcgagctatcatcttgaaggctcggaatgctgtctcattcatacagacaacccactatcagtggaaatgggtgtttatttgaaccctttggtgagggttgggtatagcggtgccgcatatacagctatgcatccggtgatgaactggctctctgcgaaagcgattctacaagggttgtgggtcaatcgactgcgccgtttgggtgtcacttcatggctgaaagaagaagtagttcgaaggcggttgaacgcctggagagctttgagtactaggaatgaagaacgtggggagatttgcatcatcaatgagatgcaaattctgcatcgatacgggtgggcccatgtgtgaagtagagccagtggcacatcgcttgtatatatcatttagtctcatgctgccgtcctaggactatagccaggcgcttataatatgctttatatcttcacctcgcgtgaaatatatacttcgggaataaaaagaaaaaatacacagttttaagattaagttctgcagcagcttgatctacgatgcatatagatcggctactgatattcaatcgcactccatgaatatattgtacaccatcaggaaaatacgaacctcagcatccaatgcattcgactttagcctaatcttcaattcccgtcttttcccaattaattttttacacccccgaggccggcgcaaagcgagcgattatgtaaccccgagccgcctgggactgtatcaaaagcaaaaacccccacttaccctccataaaccacccaaagccccaataacacataatggcaacaatccaaatcctagacggaggccttgggacctccctaggcgatctatacaacatcaaattcgactcgacaacaaccccactctgggcctcacacctgctagtgagcgacccagcaacgctgcaagcatgccaacgcgacttcggcgttgccggagtagacgttcttctaacagccacctaccaagtctccactgaaggatttgcgcggaccaaaaccgcccaattcccagacgggattccgcgcagcgcagtagggcccttcctacagaaagccgtggacatcgccgagcaagcgaaggtgcgcgagaacgccagtgtcgcgctcagccttggcccttacggcgcgtgcatggtccccggccaggagtatagcggtgcctacgacgccgcgcatgactccgaggagtcgttgtatttgtggcacttggatcggctgcggatgtttgctgaggcagagggggagcttgtgtcgcgcgtgcggtatgttgcatttgagacattgccgcggcttgatgagattcgtgctgtgagaagggcgattcaggattctgctttcgatgtgccgttttggatttcttgtgttttcccgcgcgaggatgatctcttgccggatgggagttcggtggggcaggttgtgcgcgctgcgattgcgcctttggagggtggggctgttccttgggggattgggattaattgtactaagatgcataagctggctgggcttgttgatttgtttgggcgcgctgttgcggagtgtgttgcggacgggcaggtatctgatgtgccgagtttggttttgtatcctgatgggacgaatggggaggtgtacaatactacgacgcaggtttgggagagacctgatggattgcgtgatagtgtgagtgctgacgtgagtactactctcgggagtcgggtgggaagattgtggattatgctgacgtgaatttagcgatcttgggaggtgcagttggcccaggtggtcaatgaagcctacgaaaagggctatttcaattcgttccttgtgggtgggtgttgcaaagcttctcaccacgatatcaagaaacttggagagcaattcaagactcaatagggattatgatcacgttacgagtgaagtttggaatgaaagctgaatagaataagacattataaatcggtcatgttgaattgccggctctatatggggatatttatacattatacaagtcatttaaaagagccaatcggtaaacttcgtcaacgcattgcgattggggttttcaacatgcgtgatctccccatctacaagacggcccgaccataggtcgatactggcggcacgctcaaactacattcgacatgttagcaactcttcattaagaaatagaaagaataagagggctgaactaaccttggtgcgacgccagatcttccagcaaatgatggggaaaatgaagatagggataccgatgtacgacgcaataaagtccgacgtattccagttgcccttcaagaagacggggaaaccagcaaccaaagtgatgatgatggaaccgatgaagcccacccacgcggcataaggttgcaaaggtgcttgccatgggagtgtgtctcggctcacaccttgtttcttcatcgcagcaaagaaacggatatagcacaagcaaagggttgcccaagcaatcaaaccggcaatggtgctcaggttcaaaagccaggtgaaagcctgtgctgcaccaccggtgccgagactcaggtacgccagcggaccaaagagccaggcggcaaaaacggcatagtatggcacgccagacttgttcacgcgcgcgaagatctggggcagttgcttgtctgtagtcatggcgacaatcatgcgcgatccgacccagcagtatgagttaccggcggaccacgcggcgatgagaatgcatgcatttacgatagagggcagagccttgatgccggcgttagtgatggcaatgacgaagggcgagctgttcgcgtttccggtgccagagacaaggccttgtgctcttggatccacgatcataccgatgagaagtgctccgagaatgtagaagatgccaatgcggtaagtgacacggcgggcggccttggggatggcacggtggggatcaaccgattcggatgcggtaatgacgacagtctcgacgccaatgaagctgaacgaggcgttgaccaacgaagacaggaagcccaggaagtgacctgtcggaccggtgataccgttgtagtctgtccacggtccagggtgatgccagtagcggaatccaatggcgccgcctttgggagcaccacctgcagtaatgacaatggagacaacaaccaagccaaggaaacagaggaccttgacggcacctccgaagacttcggtttcaccatagaatcgcacactcatcaaattgatagccaaaatgagtaccaatccaactgtgatcaccacggcaggcgtgagatccgtccaatatgagacaataaccgcggccgcggagacttctgaggcgatggcgatcgtgtaacagtatccgtatgaaatagcgagggagaaaccaacagccgggtcgatgaatcgagtcgcccagtgagggaaggatccagcagtcgggaaaagcgttgcgagttcggctatactttgcatcacacaccacaagactcctcccacaataatataggcgagcagcaaaccagccgggccagctttggcgtaggccgcaccagttcccacgaataaacctgtgccgataccaccgcagaaaccaatcatggtaacctggtaattgcgcaggcgtcgctgcaggggcgcacgaccaccgacattgagctcaaactcggccttgggattgacatcgtagtcttcaaaatctgcgccgggcgccgactggacgttctcgttgtcgtagccggacttctccatgttgtgtgtagtgccgatcatctaggctaggtctgccttagtagatcttaccccggagacctgaggagtgaccgaaatgcttagatgggagacagcttttttttttccgacttattattcagtctcggtccaagcacgacatcgggacttctattgacgccaaattgttctccacagtggggagactcattggactgcgtcgctcggagttcggcctctccccacttttttaagcggttgactaactttttcttcattttgccataatcgcaattgaaggcaaatcatggctttgatttgttagtctgatatcgcaaagcttggtggcataggccggcatcgtgggagcattgtggcgagtgaatcaggtatttttgcccccaaggtcccgtgaaaaatggatgcatctggaaaccacgtgctctgccggatagatccccgagaatgtaagctttgcgcctgagatatgaggcaaccttgttattcagccttagtcaccaacatcttcaaccttccaggaaccttccaggaaccttccaaggttggaattggacccttttcgtgggacaaacaatactacggatctcggtgttaggcctgaattacggagtaactgattccgatttccgaggccacgtagccgttcttctcctcgacgccctgcctttttctgatcatccgatttgcgtttaccggtataagtgctattggctcattgagaatcgatcgccggtttttgggggcatttgtatgagacttctttgaagaaaccttataaatttcgatccgccggactagaagtgagcttgcatctgtactttgacgaatatgcctttgtacgcgtatagataaagtatctagctcagccagatcattaagaagcttatcattaagcttcttcttaacccgtatgtatgtagtatccggtagcaaattttgattggtgcataaagaacgagctagctatattggaactagtgcattacctggtcacatgacacatatctaagaccttaggatttaatattgcttcgtttcgctccataatgcaagcaaatgcaaataatgaaaatactttcaaagtctaaaagattttatttagttatgtcagttcgacaggaacatgtacaattatttatgcatcaaatatttatgcacaccagggttccccggatattttaccctaaaacaatatcacatgaccctgaaaaggtcgataccacacaagacctcaacttgttggatgagattcgagatcagttttggcgtttgagttaaagtgttacatatgtaaatatcgaaggctagatccattatcaaaccaccaggtttctgtcaggttacaataatatctcgagaaatcttcgtgcaacatatggtgcaatgaatgggtcggtacggagtagggggcaattaaatagcggatcctctacggagtactccgtactacattttgggttttttggcctcgcctctattcaccctattttgtactccgtacggaggatccccttaggttcgttcggcatagtgatgtcgtatgttcgagaatatatggtatggtttgagatgcgaggggaaaaccagcaatgacacttccactcgtcactgtgtcgtatggtcaactttttcagggcccattgccggatcaaccgtgcgataggagtctaagaaattatcgtatggtccactgacagcagcgatatgcaaaggcgaagcgactccgccgaggggtatccttagactagcaccgaccgttaaccactatatcttacagctgcatcctcacaaatcagacattgcaacttctcatccgcaattgagaaccaaatcttcgctaagcccgaccgaatccccgtcctggtctatggcatctgacccgaccaggttaaagcctacctcacaaactctcactttcagtctctccccgtggcggaaagactagccatcgccgaggccgtctctctctggaagggactagagtccggcgattcatacatccccccgcccccaagcgtatctcgagtccgatccctggaattcccaagcaccgcgatagcctcctctgtaccgtcgcgtctaccgatggtgtcgcccgaagcggccagaaagttgccggtctaactagccacgggatacgtactaacatcgtccgcgcgcagcaagaccgactcccgaataaaattctccaggcatatatagacgagggcatccagcgctagacaaggagactggcttgaagtggctgtatgacgggctaactcaaaagtcgagtttgtacaagccatttctacgagacatttcgataattaatgattgaccagtatgctgtccatggactgagcgaccaccgcgaaaattcatggaccgcagctaatgggataaaatagctgcatgatatatgccccacactagaatcatttcctggggttgtagtttacccacggcgagaaacttccatgagccatcatcccagcagaaactatctgagcaactagtctataacttataggaaatgagatcgtcaacgtaactcaactgacctaacaggaaaacaagaattagcaccagcaaagcaaagacaacaagcaaagtgtaagcagatagttcacggctgggtaaggataattctcttacctggtccaattacgatttgttgacaaagtctagtcttccatgaacatgtaaagtccaatctgttggttgattgatgggtagcgctataatataattaccaacgactgtgcttccttataagtatggctggactcttactcaatcctttggcattatctaagtagctttgcagttcaatgagccgtgaatctagctctggtgtccctatgaagatcgctccgcaacttggaagtatgatgctgcgaaggtccgtagtaggggtttcttgtgctgagtcggcataaagcaggacctaattatggtgaatgataactctcttatgtagaatggtgaaacttacgctgctaactatagttcccccgagactatgtgcaataaatataatcggacaattggctgtccgcgttgaacaagacttcatcgtcctcacaggagaagtcgtcacatatttcgatccaagcggagcatagtgatgatcaaggctgatatcattggtgcaacctgggtactcttattagtctcccactcaataatagggctgcatgtccgacctcctttcctctcctgcattacgcatgcctaattcggcagaggcgttcgatagcgccagacgaacctaatattaaacactccatagtcacactcttaatgttaatcggcctatggactgaaacaagctgcctatgccaagacttccatttcgtccggatcgcggacgtccgcgcccacacactgccaagcgccaagtttccatcataattcccagcataagagctaatgcaggattcaatgccgatccacgtcggccatcacatgggagaatctcaatgttaagcttggaaacagtttattattaaacattccgatcaataacgccgatcattcgttgtcttccgtcttgggacggggtaaaattctattcagctgtcccctcattctctcccctttcattgcaaggaatgcccaattactatatctatcccttgacaattttaccttcattctcccaataatcttatctgcttgcatgttcatggaatgactgatatcgaactctcccagcgagatgccctggaggacgagtccccgctcacctccaacggtgaggggtcttctgcgcccgtgaagccagcgcaggctccaaaggccggcaggaagctgccaggatggctggatcacttcaatgcccgcgatatgaaggtgctgttccgttgcacgttggctgcatgggtcgcgtcgcttttgatcgtgatcactccgtccttaagcgtcattggtactgcgactttctttgcaacgtgagcgcatctatattttactctcggtatcaattgctaatcctatcgcgatcagtctagtactctttatggtgcctccgaccggcattgttttcattttccttttaggaactctgaccgttatcattggtatggctttgggctgggcctggggtgtcatcactatgaaggctgcgatggcagcgagaccagcagccgagacccaggccaaccttcaatccctaggacaggccgcatacagccaggccaattccaccggacaggccgtggcagaagtccagaaggagcttatctataacggctggatgcttgacgctcgtgtaacagttgtctactattgcctaatctgtctgttcatctatttaatcgtgagagacttcttgacccgtgcataatgatcgcgacactgaccctttcgcgcagtcccgtcttcgggctaagaaccccaaactcattctgttacagattctcggaatcatcatcatcgatgttactctgactattggcccgatgcttccatatttcagcggtactgtccctaaggtcttgatcgagcctgccgctattggaattgggttgggcctggtctcccattttatcttcttccctcgatctacctcccacgtcgtgcttgatggcatggaggggctggtgcggttactcaaagggcctgtggacgtcacggagaacactcttctgaaaggccaagtcttggatatggcagatcttcaaagaatcaaagggcaaaccattgctgcttacaggaatctcaagccggccatggcctttctgccgttggacttctctgtcggttggtggggtgctgacgacatcaaaagcatgaagaaaccaattcgccaggctttggtgagtagtctgtctcttcttgaagttcacatcgcccgcatcggcggagaagccaagttcaaaaagctgcaccagctcaccgtggatcgagactccgactctgattcccaagcgaatggaaatgagaaaaaacgcccacgcgaggttggcatgcgccaaatgatggagggtgttaatttggtacaagcaatgcgaagcccggaacatgaatctatgctatcggaaactgtcgaggtattgcgcaagtccagcaaggatatcctcccggcgtgtcaggaagctgttgagatcattgcagaatccattaacacggccaacaagcgttggttcggtcgcccttccaaagaacgtctcaatcagttgcacgagcgcagtcagactgtacttcagaatcttcaggccctgcgcacatcgttcgcgtcggaaaccaccgaccgtctgattcaaacacatgcggagattttcgatgaaaaaggcatgctcaaggcccttgacaaaacttcaatgcccagagttaggggtatcatgatggggatggtcttcgaagagcaggtgctcggcgtcgctgacgggtgggagcgggtcctgcgacaacttgtcgtcctcctaaaggaacgtcagaagatccgtctgtggctacccaagggcttgcgatacgcactcaactgggtatgtcgtaaaaatgccgtggcgcctatacccgcggctgatgacccaatcgtcgaccccgatgtcgcagagacgcagtccaaagcggcacagcttcatcttcgcatgagcagagggtatcgtgtccaccgaggtagcagctttgggcgcgctatcatcggcacatatcattggtttatcaaccctgaaggtctttatgcaatgcgcatggtggctgtcaccatcgcgctcgctatccctgctgcgattccccacactgcgggtttctattaccgtgaaaaaggtatctgggctctcatcatggggcagaccacactggttatatacatggccgacttcaccttctcccttatttgtcgagccattggtactgttgttggtggtgtccttggcttagttgtgtggtacatcggctcaggtcacggcaaaggtaacccgtacggtcttgctgccatcatggctgttgcgctcaccattctcatgtgggcacgtatattcacgtcccctgctttccttcaagctacaatcatggctggtgcgacctacattctggttgtcggttacagtttcgaggatacgtaagtaaatggtaccacattggggaagcaacatggctgacaacttcacaggcacatcccaacttacggcaatcccggatggggatatagtgttttctggcgacgacttgtgcttgttcttattggctccgcagcggcactaatcgtgcagctcttccctcgtccgccatctgcgtcgagacacatctgcaagtctctttcaaatgtcatccgctcactgtcggaccactacgcgcttctcttatcctgctggggacaagggcgcgaagagggcctggccgcagagaagctagctctaaatcttgcagagactatcaccgcactggacggtcccatcgccttgctgcgctttgaattttcgagctcgccatttgacagcgatcgtctcggtcaggtcaaagcactttgtcaagaactcaaccagaacattgctcgcctactttacctatctgcttcgctgccggagcacctacagactcgcctcgctcggcaagtcggtctccttgatcatcacaatatcggcgacatcatggctgttctcggtgtggttgaacaatcactcaagacgggtgaccccctacccgagatgctgccaacgccactgctcaaccgttgccacgattactggaagtcgcaccagacagatattatcctgagcaaggagttgatccgcgacgagaactaccgccgattctgcgttgccatcagcgcatacctcaagttcctggctgccgtggatgacctagtgctcgtgatgaagggcacattgggtgagtcgcacatcgtcagccgcgacctgctccacgaaccgaatgtataagagagcaaatttatattgtaattagagtgttctatcaggatcgttgacatatataattgtgcatatagcgatgtgtcatcaaaattggatcccctcacgttcctccgcacggccggttttctccaattttttcttcttcccctaattcccaacccattctacggcctttgctttgaatgaacgtcattcaatattttgtttttttcccttttgatctcctgtatggacgattaccaataattataatattcaattccatctgcgggtctcgtccatggcccctccacgtcttgcccgtcttccccggtggatcagccactggcttggctatcgcccagagcccgtgaagccactctctaaatacgaagtcgctctatggtcgttcataatctcattctgcggtctatcggtcttacaagcaattttcaactactccgactacttcaaagagcgcaatgtaccgggtatagtcgcatcctatgtacgtgtcaatagccaaatcgcattcccaaatatcgacattgactcacataaaaccagggtgcatccgccgtcctcgtcttcggcgcaattgaaagccccctagcgcaaccgcgcgctctagtcttcggccacttcttcagcgccctgaccggcctctgcgttaccaagttgtttagcctcatgccggacaaagcgcggttcgagtccctgcgctggctagccgcttcgctttcaacggctattgctattgtcgtcatgcagttgacgggtactacccacccgcctgctggcgcgactgctctgctcccagctaccaatgcggagatttggcggctttcttggtactacttgcctgtagtcctgttgtcctcgactatgctcttggtgtgcgcgttgctgttgaataatttgcatcgccggtatccggctttctggatcgcgcctacgccgccgaagccggctgcgcctgttgctccagtggcgccggcgctggcgcctgttgacgtttcgtcggaagaggagaagtcggtgaagagtcctgtatgatgctttaaagagcttctaatacactctggtaatggttgcacggcatatgccgctatctgtttcaaggatgcgagatatatatgatgtatataaaaactcggttgcactactaacatatccgagactacgtaaggaaaagaaattcaacatgactctttcagggtctaacatacctattaactgtattcacaatctcccaagagctactacgtagcaagcccctacctagggctcttcaatattcactcagtttacgactctcgttaggtctgattgcattaggggaagcagcttcgtctctctgtcttctatgtttgggtgcatttatccaattacttgcgtattgatttaggaaaaattttgagaggctactgtgtgggacaagggagagttgacaaggctgtgccaagggtttagctcttgaggtctcttccttactcttttcgtcttacttgattaacactacgtttctacaatttggacataatcaaggaacagctcatggttctatttgactcaactagaaatttaggcaccgcagaaaacagagaaagttgctacaaagcagagaagcaggcaggtatggacactgtcaaaacaaaacagaaatcccgcagaaataagcccccaggcttaatcctcctcgctgctggacgaagtcgtggacgaatagtattcctcctcaggcaaatctggaaggggaggagaaggggtaggttcctcggtaggcaggtagaaatcgcagcactgtcggcatgggcagtcatgcaccttgtagtacaatcgggcccaaatcattcgaagatagttgcgtctttcgtcatcttcttcgaaaagcttgagctcccatcgacgctgctcacgctcaaccatcttggcactctccactgcttcggtgtcctcatcgctcaatccatgcagagtgagacttccaacttgcatagacagcatgccgaacagcttcatgagcaccggatcctcgatggtggtcattagatcggcgttagtagaaagaataacccgtacgctgtcagatatctcttcaatcaagaccatgaggttattgcacctctcttcgaagcaattgccctccttctcggagccttcccgaatcaatgtccacatagacaatgtgtagaagattttgcggaggtaggtttggatttgagggacccatctgcctcctgtctgtccctcggaaagtttgttgagctccacgacgaagccatcgcggttttcctggaagttctcaatggcggcagctttgacgtcggcctgcattatgatgataacagttagagatgaggatgatgtaagctggagatgatagttattgaagatgatggtagtgaagatgcatacctcgagtcgtgggggaattccttttgtactcgagcaatagatcttgtctggcatagcagatttatcggagtacaaagagacaatgggccaagacatgacaatagatctatagagaccctcagccaaaggaataaagcctttggcttcgagatatgagtctcattcaaagcaggatgtgtcattcttttcctttataagcgcgaagaatagacttgaatatatgagccctatacaaaccagaaggggaactcaatcatgacagaattgcggtcgacgaatctatcaaatagaaaaagggggaaattatattagagaccgctgactgtgcatgatactcttagctttagagatatatagctgaagatagaaaaggtcttaggcaatcaatgaatgtaaaagttgtgctatattcaaggtatttatagggttgtagggttgtatgtgatcaaaggagtttgtgtgcgcccgtactctttctcccctttctttgtgcaccactcaaaatagcaatcaaagttgttttgcagacaaactaatatcaaactctcaaaggtccagatatcctgacaaagggcagtcaagtcgggtctttggggacgtttcaacaagaacgtgattgttcggcgcataacaagttcagatttctatgcaaaagaaggctggagttttccacaagctcggtcggctaatctctctttcatgagcacttcatagacatgcgatgcccacgcacagcaaaccttgcgcgtatccttcgggtcgatgatttcctctattccaaatgcgttcgctgttcgcaccgggttcatcagccgcaaatactcttcttccaactcttgataccgttcttccttctttccaaccttctcggcttcacgcagctcatgccgatggccaacttcaattccgccgtccaggggcagcgagccccactgtccagacggccaagcaacctgcataaccggatcacgacaacccaacataataccgcccgctacgccaaacacacgccgcgttaccacgttgaataccggcacggtggtactaaagtaagccttggcgagctcgacgccccaacgcatcgtggctgtgcgctcggcaaccgttccaatagcatagcccgcttcaagaaaacgcgtcagcttgtttcaaaggatgtaggatgaaacaaatcacttacggatgtccaaaaactgcagaataggcagattcatcacatcacacaacttcagcagccgcgttaacttctggctaccagcggcatccagtgcgcctccgttcacttcacagttgacggagataaccccaataggacgaccacctaggcgcgcaagtccaccaattgcagtacgcccccataatgcgccaatctcaaaccaggagtctttatcaactacagaggtgatgatcgaacgagcattatacatgcgtgcttgtcttcgagggatgatactccgcagtgcaacatcttcgcgctcctccaagtcagtgcagggaatagttggtggtgcatcgctcccactgttggggagatagctcagaacgacccgcagctgctcatagcactctgcctcattggcggcaaggttatcgatcgtgccgttcgtacaatgaaccataggcccgcccaggtcttggaactcgagaccttcttcgaatgtggcaccttcaacaaccttcgggcctgcattgaacaatgctccgatgtcggctgccatcactgaaaagtggcaggataccactcttgcagcgccaagcccaatctacaataaaagttagttcagctcatatcaacaaatgtcaaatggtatgtcagataaagcaaaagagaatatcacgaaactcaccgcaggtccaacaacagcccccaaattcggaatccccatattcaactgcttaataacatacggaaaagacgcaacatgagggagataactccacccttccttctgaataatcgtcacgctcccaccgccagaactcccatcaacaagcttaacaaccggcatacgcagcgcaatagcaagcttctctacataaaccgtctttccggtactcgcgccgtccgcatgtccagaccggatactgaaatcatcagccgtgaggaggaccttcctgccgcgaagcagtccagccccttggatgttattactaggcacgaaggagacaggcttctcgcgcatcggcgcggtcttttgccacgtcaccgtgccggaaacggacccgatttcttggaaggtgtttgggtcaaggagttgctcgatgcgctcgcgcacccatagcttgcctgcttgcttttggcgcacgtagcctcggttggtggggtctggctttgcggctattgcgcggagggctgcgagttgacctaggacatctgagtggtctgctgggaggtgggtttctgtggactttggttttggcttggactttcttggttgttctggtggggatatatgggatgagacctgttgtaggcggtccgtggcttggtctttgccagttctcgttgatgggctgtcgttgtcttttgtcatagtgtgtcgattgatacaggatgttgtttttattattattattgtgtagaatcggatacatctcttgtttaaggatttggtctactgaggggctaggcagaccttccgagggccgaggtcacccacgagagctataatatcttctcgaaggaagtacctggtaatgagatattttaagatacttcgattgatctatttgacctatttgaaacatattataactgatttcgttatttgatttacttgggagggacttttgcatacaattaccccggatttccccttccaccccgatgtcatccccgcactcacggcccatcaagagattgttggtcgccaacaggtatgaacttctaaaaaaagttaatgttatattatactcatgtaatatataatagaggagagatcgccgttcgtattctccatgcagcacgagagttaccctcgtcagtcgagacattcgctctctacacatcagacgaccgaccgcattgcgatctaggacgaccacagcatgcaattgaaatcccatcagcatcatcatatctcgacatttcattattggtcgacctggtccaaaaaaactctattgatgccgtgcatcccgggtatggattcctcagcgagagcgccgaattcgcgcatcgcatgtggcacgaagccggggctctcgtcataggacctggatgggaaaacgtcgcccggacgggtgataagctgcaggcaaaacagctagcacagcaatgcggtgtccctgtattagaagccatgagtcaacctaccaccaacgtggacgaagcacgtgcgtttgctacgcaggttggtttcccggttatgatcaaggctgttgatggaggaggcggccgcgggattcggctcgttcgcgaggagcatgagctggataatagtattcagagagcgattggcgagtcgccgtctcggactgtctttgttgagaaagctgctgtggacgggtttcatcatattgaaattcagattattggtgatgggacaggccaggtgcgacatttgtgggaaagagattgcagtgctcagcggcggtttcagaaggtggttgaatgcgccccggctttgatgcgggatagagctttggtcggtcgagtgatcgagtctgcgctcaggatggcaagtgaaatccgctatcaatcattaggaacctttgagttcctggtcagtgaacaacgcggggaattctactttttggaggtgaacccgcgtctgcaagtcgagcacaccattacggaatctatcagtgggatagacctggtgcagacgcagcttcttctcgcccagggatacactttacgtgatctgggcctcggcgctgaaattgacccaagtcatcttccgccaaatgccttttcaatccaacttagactgtgtgctgaagacccgagcaacgggttttctctgagcattggcaaagtgactaggtttaccgtgcctagtggcaatggaatccgggtagatacacatgtcaatgtctctgggcccgcactagttgtgggatccaacttcgacaatctgttagccaagataatcgtgactgcgcccacctgggaagcgtccgttagaaaagcccagcgagtcttggctgattcaagggttgacggtctgaagactaatatcagccttctacgagggatcgtggcccattccgatttcatggccggcaaagtcgacacgcaatggcttggactcaacatcgacgcagtactccagcaaggggagatgatatcgaagactattcagggactagatggttcagccggcccttcacagcaagtcagccagaatggactaccagtatctaatcttttgttccgaaaaggagatgcatggtcaatcacgttggaacctctgtcgaaggattcccaatcagacaaagtttcccaccatctgcgcctgtcccgggtactacgcaatgagttcccgactgcattggctgccgaaattgaatatacgactccaacttcggagggcgcaatcccctatcggatgcagctcgaaacaaccacgactgctgcgtcagcattggtgtcctcgtctcatcggcgaggtgatccaaagaatccccatcatattatacttcctctgtcaggcaaattgattgagatcctggtgtcggatggacaggatgtggttgaaaaccaggtcctagctttcgtcaagcagatgaagatggagctcgaagtacgaagccctcgaagtggtcgggtcaaatgggttcatgagatggaagacgaagaggaggatgttgccgagggcatgcttttggtcgagttggagccgaacaatggcaaagtggaagtccggggcaagttgtgattgtaggatataggatagcatctactgagtccctatacagatcaaattcgcgagtcctggttataaccaacgaatcagcttgcagatccacttggttcctcagcatcattggtctagtggtagaattcgtcgttgccatcgacgaggcccgtgttcgattcacggatgatgcacaagaatttatttttgctttttggctctggaatcggttactgaactcaataaagtatgatcgctttttggacgatgataagatgagtttggtatttactttttgcaaatcaaggcaggcggtcaatatgagcggtcacttccccaggtgacgtcaccgcctcggtcttcccatcctcttcctcttcctcttgtctctggcttgacccagggtgtttttcagtatggatgatcttaatctctatgtgctgacatttaactgtgcaagaaacattgtcgatgtcgacgtgttcgcggaccactttttcgacgcactccccgcgtctggtgcggggagctccgcacccgacctgattttcctctcgctacaagagatcgcacccattgcctactcgtttctcggaggatcctacctttcaccctacttcgatggattccgccgtgccgtccagaaagcctcggcacaaaaatggagccaccactatgtgaacttccttacggaaaatacgggaatgacaggcctgatgcttttcgcgcgcgaggacaccctggccaagatcgcctggagtgacaccgcccacgtcggcttcggggttcaggaaatgggaaacaagggtgctgttggggcacgcctgggatatgttgtcgaaggactcccatccaagaccgtggacctcactttcgtggcagcccatctcgcccccatggaggacttatatgagcaaaggaacatggattggaaaagcatagttgagcgccttgtgttcacgcacgacaccaagagaccggcagagggttcaactgcgaatgaaaataccggccttctcgacgacgctgcaacggcccacgcggagggcagtcgcagggatctcttcgcgcccaacgcctacctattccttgccggagatctcaactaccgcacgtcgaatgtcggaccctcaattcgagagatcgaacatttccctcggcgcaatgtcgacattgataacccgtcgcactattcgcaccttctgaagaacgaccagctcgtgcgcgagatgagctacggcaggaccttccacagcctgtccgaagcgcctatccacttccctcccacgtacaaatactcggacgccgcgcgcgaagctgtccgccggggcttggacaccgacgagcttgaatggaactggtcgactcaccgctggcctagctggtgcgatcgagtcctttaccttgataagccctcgtgggttggtgaggccggaaaggtcaaaccgctcgcttacaacgcactgcctctcttcgcacagtcggatcatcgtcccgtggcgctcgttgtatcggtgccgctactgccctctaacgaatcctcggacaccgagaacatccgagctgtggctccattctctattgatccgagttggaaatccaagcgagacgcggcgcgacgaaaggagattgcggtgggtgcagttgcgtatctgggactaaccagggaaggaaatgggctgctgctcgcgtcgttgctcggtgtcatcggagcgtggttcatccttcgatctatgctggaggtttgagtgacggtatggtgaacggcgctttctcgggactctatttttcctttcttttttcccctctcttaggtattttcatacgaatatcatgcaatgctgcccatcgcccgaaccggcgctggatgaaaagccatgtccctttcgctccgcatagtctccatagttccaaggtttgtaatccgggtgtattccgaggtcgtcagcagcctcaattggatgtctcgtgacgggaaaaacaccccgcattcctcgaatcgatcccatcaagtccgtcagataaactcaagggcccagctcaccggccgcagtcccaattatgtaccatcagacaaggcggcccgtcggtgatttcttagcaacaacctaaactaggaaattactcttttgggcccaagtcacatgaaccgagccgacccgaaacggtcgggatgcgttctgcaagtgtgaaagatggcgctaaggactgaggggcaccgtggcttggattctagacaagcggatgaggtcatgttggggttggtatactccgattatcgctcgtccatttcttgcttatgcgcgaggttcccatgatttggatgggctgggattgtaccctgcaggtactgcatagcctctctcttcgatgtctctggggtctttgtctccctctctcggatactgccgtggctgtcattagtaaggtttccactcttgacctaactctgtaggcacttgggcacctccgtcttccacattgtcacaccggggacttcttttttttttctttgggctgtgtggtctagatgcggagggagtcgtctactgcttttactccaaatgttgccatgtatgttcctcaactgcggaccactattctttgacggtccgcgacatccgggctgcagttgtcctgaaaatactactggctgttatgtaccgggctcttctatacatcccacgtcgtaaaccggtagtagtaaccccgaccattaagaaacgtgcgataacgcatggaacaggccacatgatcgggtcaagtgacccagtgagcttaatttcctgcttctccaaccccaaggctttcaccgcgtgtacaacttacgaaagcccttcaggcatgagaggcggtgtgtccacaacgtgtatagagatcaagacccccggacttctggaatgcaccgcactggatgtgatagcaagccctgcatttggggcggaaatcatctcattttcttacattggagtgtgtctctgggcacaaaaaaaaaaaagaaaagaaaagaaaaagatgggaagaaaaagacggaaagaaaatccccgcccggactccacagcctccacagggatgaaagggagaaaccatacaaatatactccgtccgacccaagtcaaagggctattgaattggattgttatagtgagattcaaagactggaatgtcggccggtcattggcgtgtactgaaatatgagataacgatcatccttagagtacctcccgtactccgtagttgaataggggttggatatactccagtgccaataaacgcaaacagaaattgggcagcaaaaaaaaaaaaaaaaacatgtcattgacagggcagatcaggagaaagtggacagcacagaaggatcggaatgttccatgcaaacttacaaacaggcctgaaggggataaccgaccaaatcccctgagttcggtggagattttcttttccagaacaaaaccagaacgacggcggagtccatagggagagggcccaagagcctaagacccagcattgggaatcggagggggcatcaatttgaaacggcgtctatactgaagacacaactagaagcaatcaaaagaaagtcaaaacgtaatctcccagtacaacatacaacatatatacctcgacggagtacgtacgtcgatacatattaagttccttcatctgttctgaagcttaaaggtttgtttgcattaggctgttgtttcaaaaatctgccctgtcaggtgctccacctgtccctgcaatatacatatgagactgcgagtcatcccgcgattttctgatgcatcgtatcgtcattttgtttttcgatgtatggtggatccttcattggcccccttcatgcaccgaagaccagcattgagccgatcaacccgcatgctcagatcaagggatcaggatcgaccgatctctgcattttagaatctattaaatatgtagcaggtgggataggcctctcacacgccggccctgcggaatggcaggggatcgaatgccacctagggcttggtaatcaaagacggagatgggttagagagagattaacggaataatataaaagggaataatataaaacagtcaatacacgacgtacaaataataaaagacaatatttagaaagaaataataaaataaaaacataaaaaataaaaaacccaaccccagtaaacgaaaatgggaaccctaaaaattctaatccttccttatttaactgcctggaacttggatttgttgcattgttttacttctaagccatctttttgagcctctaatataaagtcatcttctcgatcctctctgtcttcaaatctggtcttctcctctgattgtggctgaatctctatccaacgcaaccttgaaccgccgacgtcatcgtgttgtactacacattctaggccttggtccttattctccgttacatttaatcagtgaccaagacactttttctcttctgtccaaactctcgaagcatccaactcaacgtccttggtcgatcccacattcgatcccaacaaccccggtccaatatcatcaaccatgtactcttgcgcaaactatccccgcgggtgccgaggccgtgtcaaccgacaaggagcaaagtgctctgactgcgtggtatgtgccaaatgatatctgtgtctggtctatgcaaagatcaacgaaagacaaaggaaaacaatccaaactaaccctataccagtctctaaacttgcgccgtccagcttcgccgttcgcccaaccacgcgagtacaagcgcgcacttccctcggaactctttggcgagctctctaaactctccgagcccaagctgcaatgaatgcgaagctcatacatccgggacggtccgaagaacgcctcagcttctagctaggttgcatatcctgccggctgggatgcaccgcgcatgttcgacggccgcttcctttgttctttcttatttgctctccacgtctctcatctgcatcgccgggagtttctttgttatattcggccgtctgcctctactttgatgcctaattgcccggttttctctttgatctcgtctggactctccccacattggctgggctaatgagtgagctctcacgaatatctcctggaaactggagaaccgggcgtggacttcgcgaagatttccactttcactcgcttgggtttgtttcgaggacaaagaacggcccacttttcttttttttttttttgcatggaggatagatcgcttcattttgtttttgcatggatacctacggatatggatctgccactggagggcagtggcgctgatggattgggttctttcaactctccggttgatcgttgatcgctcccttcttttccttgcgcatacgtgtgctttctgctttttatgcccgattttttatgttcttttaactgatgttgactcttttctttgtaaacggtgatgccatacccctctgttttactgctttcatatgaccattcccctagtgctatatacctatttacagcattcatactattatgtcttgacatctatctcttctcgaatatctctctaaacaaatgtacattgtagactcgggcctgaccgcaagattacgtctgtcaacccaacacttgacacccaatcctgacaacgtatcaggtctacatgtacattaccctgagccgcagttccggggctatcaagttctgggcccaaacccaagcctctctctctaacctgtcgcggggacccgacatccggatgatcctcttccctgacatttctcagccgcaacgaatcctccgtctcacatagaaaaccaacatagcccaaaagaaaatccatccaagtctagaatctcgctcctgcactcatcccgtccaactctcggctcaccaactcacacgggaagcgtccttcatcagcccatccattcccctcgtgtcccatcacatcatccccccgaatccgctgcgcaatcccgagtccaacccttgtagcagttacaagatccccgtcacgatctagacctcgctggcccgaatctacagatctgcgcaaagagatgcgcgggtggcatgttttgttcccctcgcccggccagtggccaggggctatgttgcacgcgagattgcgggatacgggatacgggttacgggttacgggttacgggttgcggttacggggttaggcaataatggcatttgtgcgaggctccgtacgacctgcgccgtcgatcgttcgggttgctgtcgatggctcatgtcatgcaggggctagctatccctgtccctgtctgtctatggtgggcgcacacatacctctaacgcaccagctcttgcgggtggtatgtatctgactgacgccgttgcggcccgcggctttggtgatatgactaagttctacactcggccgtaactattggtctggtttttggctttttggcttttttttaccggcgcaggttgtgaaggtcatgtggtgtcccacggggtgcatctagacttagctgggccctggctggcctttttctcggaaaatccgtggtcccgaggggatcgttggctatgatatgtgatatcctatgcttttttttgcgggaaacgtgtcataccttgcagaatccgctcgaggacgggggaaaagggggccgcctactccgtaccgcagaacacagtacggagtacaataggagaatgcagaaaaagagaaccatgtcgatcgcttgtctcagagatggatagtttcccgctctatgtgttttgtccacaaatgaaactattgtctgtacgtgagattattgtgagctagacaatcccccctcgggccaaccacatatccaaatgggcaggagatcaggggtggccaagaaaaagaacaactcaaaaagaagaacgggaaaaaaaagagaaacaccaaatatccactttggtcggattatctgggctccatctgaatgtaaaacaaagcccagtgggatgcactagctacccagcctagtgttagatgtgcttctagccccttctactggccttctacgccgtttctctttttgggctctagcgtcgaaatttcaagccccctttttctctcgcggttttgacttggtattggccgtaattttcctgcgctcagccacattccacagtccacagtagcggatcgatcgctgtttcaggaactgtggggaatttggcacgttccaattccgcgggatgcgttgctcttgagaacgatcccctagctcgtttggaatttcctaagatctgttgatcgctgggggagggataatcggtgtggcgttgcgtttcccgttgacacttgggtaaattctgcatcggcattcgttgatatcgtccctgagacaagggtctcgtcgctgggcactatatttacagatctggcatattatgtctcattcctcaaacttactagaagtaagcacctacctagaagagaagaaaatcctaaaatattacctccgcgaattgcctagattaacactatattaactctcgtctccctaatatcccgacacaatgacaacgtgttgggcagctgccatgtagccaatccgtgtcaagctcagaaaatagattgcctctcgaaaagtctagaaaaaaacaggattcccgtggaaagcaaatcaatgactcgcgagcttgtctatatccaacaatcaagccactgtggatttcgtccatagatgggtgttgttgcatgtggcaatatccactgtgccctaagcgttttcgaagaccctcttattcgacacagaagtgtcaaaccgtcaaaacaggccgtcgtggagtgcccgatcggatctacaaacatatattgcctctcggcatctggctgccaattggttattagttccggtctggaattccccttcgggattggagtgataagcacggaacggctgggacggcaagttacggctgtctttacagtgaacgcgaccgcctagctcaccgccgggttttcatcggcctttatgaattttgaaatgagatctagttttgacgttacttttatatgaactagatcgaaagcagacaagtcgtcgtatagtgtgaataaagaggcaaaggggcaaaggtcaaaggggcagactataggaaatcaagtatataagcaataggaattcgattattgcggattaaactacggagtacatattccgtgtagttatacatatgaactgtatgtgtataactcagatttgtgtaagtgtatataaatactgcgggcaaaatggttaccggcggtaaaatctgccgtacggcaagtgtttggtccttgagagccgctttggggcgtaaatcccttaatttccgttcaaggtctggcgctttacgcggataccggcaccttgcggaagaatttgcgatcaatatattaattttgccgacagagacaatcaatatattggttcttacggagtagttatgttgtgcttgacattttatatcttaggctttcttagtggatcattgttcggggctctcggggggtggaggttaaggtctaagggggcctcgattcaattcatgctccaatagtccgtacggcattttatatgtttccaagtgtaatcatctacacgttcaaaatttgcccgcacacccactgtgcggtcttcgtgtggagtgtccaatctcgttcgtcctccagagtttcggtatcgcttgctttgttgccatatcctgcgtgacaggcctttccaagtgcttcgaaaacaacaacttggtctctcatatgtttatctaaacaggctcttctgacggtggaatcaggtttcttgtctgcattggcatttggactctcgtttgagatttcctcaatgaatccttccacacatcggcggactaaatctgcagccccagaaaatgcagcctcggtttgagactcgtgcctatgatcatgagctggttgttgcttttgtttccccttgttcttgggcttgtgcaggcgatcgcctcctatattgccaagaatatcgtggcctattctgaaacctgaagaggtatgggccacaagaaggatgtatacgtggctgcggtgatttgtggcttccgatgtgtgtattttgataggaactggtgtatctttggatgatattttgctgagcatatcttcttcacatggaggcgtagagcttttggcaaatatagatggatccagctttctcgtttcacggcgaagcaggcgtcgagtgccttgttcgataaactgtcgaagagtgctccccgtgccttctgtgttgctgtttagggtgggttgatcaggtgctagcactgtgatatcaatttgcgtgactttgccgcgttcgtgatccatcaagttaattcgtgggaagctggatagaggctcgggtgacttcttgttttgattttcgtcatctttcaatcgagatccaagtggatgtatgagaaaagtgacctctcccaggtcaaccggccccgttgtccagccgcgcttatgaagaataacggacaggggaggaagtccgagtttggcgaaattgggcacaataacttgcgctgcatagtcatatgatggagagaaggtagcattggttccaccagttatgttcactttcacaaagggtgtcgccgcctgcgatccaacatgaagtagatacgggtagagtgcctggaagacgagaaagatggcaccggcagttgagagcttgatgtcgtattcagacttcacactgacttgtgacaagtccagaagcggaccacttttcgatctggttgactgtgggcagaagttcaaggactgggagccaacctcgcctcccgagacttcgctgccgctaatctcggccaacagcttcactgctgcggcatgagatctcttgagccccttctttccatctctatttccgcgaacatgatcaatgctgactggacgaccagtcaatgcagacagcccgatggcaatgcgaaccagctgcccgccgccttccagagtttggccgttcaggtgaacgtggcttaatttggacgaaatagatcgcgaggccgccatttcaggagattttatctttgacagggatacttcaaatccttgaaatccctcgaaattccgggcgaaaaccaattattatattaattttgaccagagtcaggtcgtgaggctgcgtcttggcgtgagtcacttcggggctgggtaatatttattggcgccacaggcgtttttagcgcttagcgaaggcttagctctagatagaatattggaagggaaatcgagactcacctggggaagaggttgttggtttgttgtaaaatggaggaaatggaggaagtgaaaatggaagtcgccatggagttcgcaccttccctactgtgatgtgatgcagtactttcctctcatgatttcgcatctcttcaatcttccctctccaaatttcctcttctctgaatacctttttctctcaatactggctgtagctatatactctgcagacattttgtaacatgttttcttctacatccaatacacgcaacctaagaaggtccatgtccacccgctcaatacgaaaaccgcgacgactagccccagaaatccctgatgcggctgtgcagcatgcagcagcagcagctgcagcttcgcgtgcaatgcgctctagtcaaggctcgtctcaggactcgaaaagctcatacgaacgactaggtggtccaggaaattttgccatccctcgaaggcgtcacggatcaagccttcggagcactgatgatggctcgtccgtcggccagggcgactttcctaaagctccaaatccccgtcagtccaaagaactgaccggcgtatctgctcgagcgcattgcttcgatgaccctgcggcccttcccccaatcacagaactcgacggacttgacggacgagacagctcagtcccctcttcatatcgccgattgcgcaaggccaagtcgatgttctcgaccagccagcgaacttcacagaccccatatggagtgcctacccttccttgcagtgatccccttgatcccgagcgcagtcctggattccagctgccacgaacaatgagacgatccatgtcttttcttcggggaagttatcaatccaatcaagtcgctccaacttctaagggtcatgatgcggctattcagcttgctcgtagccaatttgcccaggatcccgacgctggaggtgttcagactcgccggccatctttcttgctaagacgcaagaaagagcataggccatttcgaaagtcgttccgggccacaagtgaaagtggcgtcgataccgggcgttctcttaaatctcggtctttttccaattccatcaaaaacaaattcaaacgtgtgtttgggttttccaggctcgatcaacaacctggtagcccaaatgcgtccatggtaaccccggctagaaaaagcattgaaggattctccccaaacaaggtttcagccattggggatggcactgattccaactatttccggccaatgccccagtctcccagccaagagagtctctgcacttccaagtcgcgcgtcaccagttgggctgattcaaccacgccgaacacagttacaactcggaagctaggacatcgccaatctctctctttgattagagaggacggattgaatcagcaaataccacggacgcctacaatggatgatacggaaaatcaatctcctctagctgcgagagcaaaccctcatcgaattagcattgttgacagtcaagatttgtacactgcgttgatgaaacaaatgggccagaattccctgcctaattccaatgaggatatggtcttcggcaatgtgtcgcagcatcgtgtgatcccagagcgggtgaattcggtctactcccaacatggccgacgcagtatccgtcatgtcccaagccaagaatcctcgacctcgcccggttcattcgcaaccgcgcgtggtggtgatcaatccagtccacgaaagtatcctcgctcagttaggtcgatgcaagtttctcggggcatgccgtctcagatgaaagatcaacatatgactgctgtttcggacgcaaagtctccgcaatcagcgtacgctttttgcgaggaatcggatgatgataatggtagcgttattgtttctcggcttcgggcctcgacaagggatattgtttccccaagtgtctattcccggaccaccagtggtaataccccaacaagaactgacaataccgacatcggcgttcatgatgaaccaggaacggcgaccatctttacttcacagcggacaacatacagctcacccaagcgtaccaatcgggcttcatcttccacacctaatgtaaagcccagtgccgactggcagcaatggatgagctcgcagattgaaagaattgagcaggcaagccccacaagggagcatgtcagagaatgtgcacaataccaggacgatgatgagtactttaccagcatagctcgacgagctccagtcgctgtctccgctcccggctcagcaactgtactcagggttccagactgccaaagtatcaccgagcgtaaagcttcagctgagaacagaatcctgtcacaaagcaatttctcccgtccattaacccaggcttccagcatgcgaaccatcatgccattgcagacaactaagtcagagaatatggtgcagtcttacgctaactcggtatccttggataccgctgctaagtccggtgaaaatgattcacccaagtcgatccctgttgcctgcaatcaacaaccgtcgccaattcgactaagatctggaaacatgcagccaccagagtccccaactcccaaaggtgtgggagcaaaacgatccttgaccaaggagcaacagcgacgctattcatctaggcgtgctccgatctcccaggataacaggatcaatcacttccggtccattcgtactcaacgagacaaccgtgtaaacaatgagaacgcgaggcaacaggatgagtacaatgacatgatggaaagctaccaccaacttcaagacattcattccacgatctctagcaagcgcatggtggatatgttcttggacagtcgccgtcgacaaatgggtgaagtcaccgacaacgatacaaccacagaggcttttctttgaacgtgggggactggctcttctgttattggaatacctcgggcgttgttcaatttttgatctgtcatattctttcgaggactctaatcattcattccctcattcattcaaccatcactttgggacatgtatactaaagctccgcgggtcggagttgtggaagcgtggaagcagccattgttatctttcattattttcttgaattaaaaaatatcctacccaattcattcgatattcacctggttgaaatgaataacagggtgattctcaaaagaaacaaaaaaaaagaaaatgctttaaataaacattggacccttggcctagtctaggctccagtggcaaaacacaaatcacattgcccgagcctcgccgttagtgtctcactttatctcgcatcgcgcacttctgcctgaagaaacgttggggctttttgtttttcttgctgaaaatatggccatcataagtcagcctaaatgcgtcagttctatgcgtaatagaagctcccatccattgttcaatgtaagcttaatgaaacaagtctaaaccgaaaaaaaaaaaaagaaatctctccctcggggaatcgaaccccggtctcccgcgcttatcggttttaatgacaagcggaaatcatcaccactagaccaaggaagaatgcgatgaccgagttactgctcggccacttggctggttgatgtgaggacatgaccatcttgtcattataagcgagcatccaatataattcaccttgtagtcaacaaaataatcatggaagcttcaatcaaaattttattcaggcaatttcgataaatatcttttccagtccaaggcaccatagctgaaggtttaatctattcatgagtgggcaaaaatcgataaccgcacgcaggtcatatatatatccctaaacggtaatagcctggcggtgaatattaataggttattacatacaagtataaaattaatcgcctgctacgtcgtatgtaagtgaaatgaattcgcacagatttccatcggaggcaaatcaactgcaatgtattcaaccaaatcagtccaaatagtcacctttgtctggaatagtttgttcagccactggtatccacgcgtggtaataaatggatcgccgcgtgtgactaagagttcaatgtagggatttcccgtgtaggtattggccgtgtgggtattcgccggatgggctgatgtcaaccatgtaggtattctccaaataggtgatcgccatgtaggtattgcccacatataagagaaggggatggccttgtttctgcgtaggttgagggagttgcacaaggtacataattatcactttaccaacaatggatattttcctggacgttctagatactttggtcctcgaccggtgctacgcagtactctcgccagacccaacagccatctccaacaatgatactcaagccactgcccatttgaaccaacatgtcggggtatattaccctatgcagccctcgaagtgggcggaggcaagcctctggaagagagacgacattgccagacaagcattgtcactgtacgtgattatatggtaagtcccttcactcaaagtaaccacagcatcctagaaactgagacctcgatacgcaacaggcttttcgcaatgataatgtacctcctcggtagccttctcctatatcacaccctcttcgacaaaagactactccaacacccgcgcttcctcgcacaccaagtcaagctcgagatcaaccaaggcatctccgcaatcccagtcatggccctcctcaccgtcccattctttctagctgagataaggggctggtcgaagctatatgatctcaccagcgactccccgttcttcggatacaccttgctccagtatccattgttcatctgcttcacagatagtggcatttactggatacaccgtggtctgcatcatcctagcgtctatcgctggcttcacaagccacaccataaatgggcggtgccgactccgttcgctagttatgcgtttcaccctctggatggatgggcgcagagtctcccctaccatgtttacccgttgctctttccgttgcagaagggagcatatctgggactgtttatgtttgtcactgtgtggacggtgctgattcgtgagtttttatgatctacttgcaacgagagtatgatggctgacattgattctacagacgacgctgagtacttgccaacatcggtggtaatcaacggcgcttcttgtcacacgatgcatcacttgtacttcaattacaattacgggcagtttacaacggcatgggatcgcctcgcgggaacataccgaaagcctaagggggatagtttcatggaaggtcagcaaatggatgggaaagggaaactcggaggtaagtgtgaatagatggagatccgggaagggcctatcttgtatttaaatgtaacactctcttgacagggtagtcatttgagatgatattaatatttaatataaatactatgtgattttggatgtctgtttcctctcgagtgttcggaaaagcgaatttaccatgtacaacatttggttatattgtatttatactggaaattatggcggactttgatgacaccattgaatgaattcattcaaattccccaagtcatcagtagcagtgttatccatataccgaaggctgacatcagatctgccagtagcatccagagtggcattcaacaaccaccaaagctcctgggcgtgtttcggatacccaagatgaaggaattgatccttatctaggagaccaatgacagaatcccagatgcgtctccaattgctagacgcacaccgtattctatcgagcgataggtatcttaataagccagctctcgcttggaaggcgagagaattaatggctatatgatattcttagcaattaatcaatggctgattccagttatcaacataccgtaaatcagaatcagaagatgctcaactgacaccgaaagactccatggtattgggtcattacctagaggagtttcaagcaactgcgtgatcacatcttttagaggaggaagtgggagctctgtcgagtgcgacatggcaattctgctgaaagaagatgcactttcggcttcccatagcccagcactccaaggaaaatgacagtccatctcaaagactgatattgatgggtggtttttgaagcagacggtgagaaatccgtccgctaaaaagacccaacaagcgattcttggaactggttagcgatgcatttcaagagaagacaagataagaaagactaggatataaagtaccttatacacacttcctctgccaccaaatttctccaagtcatctcatcacaaacggtgggagcggctcctcgcttgagctggaaaatccctagggatcggatggtggatactaaacatggatgtcggacgatgcggatacgacgtctcgtttgcatactgtcttgtccaaattgaagcatctcaataataagagcactctgcattagctgtacatttgataaaagatgcgactggtctttcggtgaagtgagtgttgataggtccgcaattttgcgaaatatatactcttccgcgacgtcgaacagtccggatggtagggcccctccatctagtggaatagtatatgtggcaccggatagaaatattgcgagtaacagagcattggagatgtttcctgggtcgaaggttggaaaatgcaccacgggtaaatgccaatgcagtgagtgaaagaacgcagagatagaagcagagatattggaaacccccaggagagtagaaagctccataaaatcaagcgggcttagcgttcctgtgcttcccagacccattgactttgaagtgtcgaccaactccgtcataatctcggataattggttggaaagctttgaagggaagagtgtatcaggattgaactggagtaggtaatcatccgtgaaagatggcagagtcgatggtacttggaaagataaatttgtaagttggaaatcaccatcaaaagctgacataggatcagtaggaacgagggcatcttcgatatgggaattgagtgtttcgaggtttcgtcgaacagaacactttgcagtctccccaatcgccagtctatctctttggaaagaaggattggcaaagtgttggagaaaagaaaacgacccactgtctctcgagttcgctcgcgatgtggttatcgaaggcgagagcgaggttactgcggagcaactgggatccccggatatctcttgggttacgaaagtacattctcgcccaaaggagcgacagcgagagcaaggtaaatttcggtcgcaggatgctttggcaaagtagcatagatcacacgaatgccttttcctacctggcttggctgcaggaggcgcaggttgattgaattttttcgcacagtttttgatatgtcttcgtgtgacctcactttcgagcattagatgttatcattatttatagtaatgatactttacatacggctttagaaatgatttgctgcatagaggacagctagaagagagctgctgtgtatctgggagatgatcagcctatgcataatttgtaagggcgttcattggaccttacgggtcacttcatggcgaattaaatgagtcttcctctggtaggctttttcgcattgtgtacattgaaacatgacgtcgacaccagtgttgttacaatctgaatgagaaaggaaggggaaaggggcagtgggcagtgggcggttgcgagtcagcgcgtggacgaattccatccgtgcgtggccgtatccccgacaaatcgtatttattctaacgtcgcaaaattgaagaaattcaatctcaacatgctattctattattgtcttgaatgaagatgagatgagaacagaaatgaacaatctcctggcgcatgcatgtcggtgactttcccaaatatcattatgtatgctatatatatcatgaaaaggaccagcattcttttttcccgtggcccagactgccaggaggaagcttttcattagcaaattttagtatgcagcgctattactccgtacccttgcagactctacatagcatggcatgatccaagcccagtcccagtgatttattgaagccttagggctgggcattgcctgaataaatgacaaattcgggtatagtcaccccgagaaggttttctcaagtgctagtttcctacttattttgccaacgccatgaaaagtaagctgattctttggggcaaactaacggaactttccgaacccctggcgtgcacggaacctggcgtacgtcaaattcgatgattagtggatcaatagaaaatctttttcaaaatcaagttgtagtatcacatcaactagtcgagaaagtctccttcgctcaagcacacggggtgttaggtaaattattatcaatctgcactctgtagatataccgaattttgtatatgagaaggggtggagctattaaaacgggacaaagctcaggatcaaagatgaacactcgcgtgcacgccagactgcagatcactctgcagatgcggaaacagacgttgtggatcataacaagatcgtaagcctggtggggcgcacatctctagcgcagccaaggaggtcaaggcacccccaagggttaaaagaccatatggggtagtgtggaatttataccctgaatttcgaaagttgcgcaatacttcgacgtccgagtatgccatgtcgtgtctgatttgtagggagtagggaatacagaatattttcccctggaaaaaaccgatccggattgcttggcttcgaatgagtcttgaaatgcaccgttcctgactacagacccttgcacgcaggtagccggggttccagatcagataggaggcacatgatgactagtctggggctacgaggactcgaatttggtcgtacagacattttcctggtccaatttgaatttttcggcttattaccccgaatagccctatattgaaactgatgccttgcttggagtgcccctgaactgagatatcacgagcacaaagaactgcctgagatacgtgcatatgggggctggactagctcggactacccccgagcgcattaactaaggcgctaattgcattagcggcccgggagtgaagtgataggtctagcataaggtttggatatcaggtttggttcgttgaccaacttgtcaaccaaaaacgagggaaattaggagcaggggaccaataagaaagttattgacaagcagaatgggctggtctagtctttcttgtttgggctaggcagtacgttgtgatgtagatcgacgtttcctcccctatttttgagatttctataacgaccgactgatggattggcacatataaggctgcctgtctctcttattcattcctgttcttcatctcttcgttgttagtttttttccacccaacactcgcttttgctggtatcattcagcgtccattctttctttcactctaaatatacttccaactcgcaaatatgaagcaatccatgatcacttcgcttgtggctctcgcagcttcatgctctgtaaggaaaaccgtgccattgttgctgtcgcaatttgacgtacactaacagattgtgtcactatagggagcccaagccactgagagcttgattagcgtgcccgttaatctctgcgccgccatcctcggagaggctgcatgcaagcagcagaccgtcaccaagggactgatcagcgtgcccgtcaacgcgtgtgtcgcagtccttggaaaagccaagtgtgaccaggtctcttccgctctcctcggcaaccacggtctccacacccgcgacagcttgattagcgtgcccgttaatctctgcaccgccatcctcggagaggccgaatgcaagcagaagaccaccagcaatggtctcatcagcgtgcctgtcaacacctgcgtggctgtccttggagaggccgagtgtgaccagacctcttcctcctctggcagcggcgacggtgccttgatcagtgttccgatcaacgtttgtctggctgtcctcggtgaggccgagtgccagcagaaatctacctctactggtagtttgatcgatatccccatcaacctgtgcctggccgtcttgggtgaggttgattgccgtgatggatcgtccaccccgcctcccgccattgccaccccatcttcccccgcggagaccactaccccggttgtgattccaggaaagactaccatcccggctattgtaccgggtgagactacagttcccactgttcctgttgttgttcctggcgagtctactactcccgtcgttgtgccaggcaccaccatccctgtcgttgtgccgggtgagactaccgttcccactgttcccgttactgttccgtgcgagtccaccatccctgtagttgttccgggcgaatctaccacccccgtcgtcgtgccaggtgagaccaccaacactgtcgctgttccgggaaagactacagtccccactgtccctgttctcgttcctgccgagtctaccacccccgtcgctgttccggttgagacttccacccccgtcgctgttccggttgagacttccacccccgttgttgtgccaggcgagtcttccatccctgccgccgaggcttctaccaccacagtctggactggccctaagggacctggctctcctcactcctccggtgatgcctccgcctgggttcctacatacacccgtgttccttccgtcaccgtgggacgtccatcccacaccggcagcttcacccgtgttactgctacctctaccaaggccatcactggatccaagacctataccggcattgtggctcacacttctcccgcctccggtggcaacggaagcaagcccagcgccagcaccattccgttcaacgcagctggtcgtgctactttgtccggcgttgccgtggtgttcggtgctctctgcgctgttgctatgcagatttgagtggtggataatcctgacaaaggtggtggctggtggctggtggggatagttgggttgctcattgttgagatttatgttcctgttgcgttggacatatcagtccgttttactcattctccttctatattcgttaaatcaacatgaggtaatataattacacgatatacgtctctcaaattggtttttgttctcgcagtttagactgtctatgcatatgatgactctattgattatcaggatgtttcttgattcttgtacagtagtttaatgattcttgattgtaaaagaagtatcatgtgtattcgtagaaaagcaaaaagctagcgtggtacgcgtaccgataatcacgggggtcccagaaaactaataatagactatgtgacagatcgtatgcgaggggccatactccgtgcagatctatttctcaaaccaaagcaagtcgtatacaatgatacatagaggggggattcccaaaatccggggaagcgggtctgcgggtccaagttcgagtccttcatgttcccgaaagaaaaaaaatatggtagcctcccctaatttgtgtcatgagagatctactcatttaaaccagccgcgtaacgggttctatgcaggtgcgttgttagcgaatctcaatcggtcctacccccgacgaagggaccaggcggaccaacacctgttaggattcctgtgttctgagggatctcgccctgggtgaacgcgcgatctccgggttcttgcagttaacggaaggtggacagccttggcccagagaccgcaccgacggtcagatatcactgagctaagtggagctataactgttctgtttgtttgttataacagagctttttttattcttgtgatttgatcggtggatatctcaaggttgttcttcttaattaggtaatcatgaagctattccaaggttcaggcatttgacccttcgcagatcgtatgctaagtgagaattcatattattgcctaccgccaactttttgaaagagtatattaactagtattcttttatttcttcttgctgaaactctctcggcgtattttccaacgaaattcagagaggaaactgggccgcgagttggctgcaagggggttccgctatcggcagcttgctttttttctagctcatgagatcctggtatttcattggagtgctggcaaggtgttgagttccaaggatggcatggacttcaataaattaccatttaggtttcttctaggcattagtccggtttcttctgatccgtacacgaatcattgttgcccaccgcaatccattcctttgttctatgcgcactctcaatctgccttatcggtaactccaaatacctcccttaagcgagtatcatactcaattctatcctgtcgctttgtggctccaatcctcacaaaatcctgagaccagtaccatgacattgtctcttggaaggcctcatccggattctgacaatattgactaaagcggggctgaatttgcttgtagaagaccgaaaagagaccgggcttgcgagtgcaagagagaaccagaacgttccagatcgccagctccggtccattatcccagagaggtttgcctttcgagaagcctccccaaataatccttcttcattttccaaaatttccataagttcagtcctggctgcttcataatcgactgcatcttcggatatttctcggtcttggatttcgagtaacaaaggacgatttgtcaattggaggtaaccgtctttgtcgataacgaacgagccaattgacgggagaggtacacgcgctagacttagaaaaatccgagagagatcgcgaaaaaatgtgcgccggtagagggtcttagtctttttcccgccaggtagacgaaagcatttgtcccacattcctctcgatgtgctcgataaccaagtagcctggatccaacgcatcgcttcggtatctcgatactcgggatttattgtgaacatacgacgaaggaagggaacgtcctaaagacgaaagaaacaggcggcggaggtgttggaaataccggcttagtagagggagattgtcgatgtgcgagagctaggaaagtccatcagtatggtgccggttggttgtaaaaagaatggaagccacacagtctctccatcagaaggcgcaaacccgtaaagacggggaatgggtatgtcagggcaattatcttgtagccaagcatacgtccctgcttcgcatcgaatcttctcatcgcaattccctgtacaaaagtcctcgcctagtcggtgtgaaagaggaagtcgaagcaggactcgagtccccggctgttttctgactttccaatcgctgacagtgacaggtatacagacgttgaaacttccatgaagccaatctttaacatcggccacttgacatgagacggtcgatgaaaggcatgatgcgtgacaacatccttgatccaatcccgataattattgagactggcaaaaaactcgtgtctttgactgggatattcgagtcgacgtaagatgttgacctcttcttttcgtgcctttgagtaagtgatctcacctctcaacagagggagggtcttcggcattgtgtaggtccttgagaatggactttccttaccagtgagagcagattccaggccaccgcttgaaaattgcaggttcgtaggtacgacgttgtggatcaaattgtcaactcgatgagcgccaaaccctgcaaataggggtagttgcctggttgcctaagacgtggtgtttgcttgtatagacgttgtttaaactcaggtttgacacttcctgggagagctgatgagataggactgtaatcgtgggtccacagctttctcaggtatggaggtgtttgtggagagttcaggtcccacgggtgttgccatcgggtcccacgttagcttccgctgtaaagcttatgctaaattcctataaccaatacaaaaaaaaaaaaaacaaattatgtagagtcaagactccattaacaaggtcaaaatcgaagaagacattagaaatcagaatgtcggtaaaaatgccaaaaaatcctctgacccgggatcgaaccagggacctcaagatgacaggttctttgcagaacaggacaattacagtcttgcgctcttccagctgagctatcaggggatgtgattagaataaactttcctttcttgatatatgaggacaaaaatgttaaaaatcattaacccaaaaaatcccctgacccgggatcgaaccagggacctcaagatgacaggttctttgcagaacaggacaattacagtcttgcgctcttccagctgagctatcagaggggtgattgaaggatgggcggaatttggatattataacctggctgaatccatgtctttgggctgcgaatgttgtttctggtgtgatggtaggccaagtgaatgagaactgcccaatctagtcacatgatgttaggctggtggaaataattccacctggccgctctgcagcatacgggatagttcacactgcatgctgtacacatctaaaaccaaaaaaaggaactataacaatgcggaattcctgaatatatagttgcctccatgtgcagctatcaaaaaatggaaatcacaactataatacagcaatagccccaggaggcgagcccactccacccttaagatgcaacggcgcactagtcaagaagaaagaccacttgttcaacgccgcgcattgtgtgctcagcttttccaggtcccataattccccgatcggagtaccccactgacacagtagccactcatgcaggcaacagtcctgagcataaggccaagcttcgaatcccatggtatcacaggccactgcagaaaactgtttatcgtatagccacctgacggttttcatgttgccttcgattccaatatattggcaagatctgacgcctttggcccttgcctcgggatctgccgtcctgtactgaagtcagctagaaactcatgatacgctgggaataggtgctttcttactcgtgccatttgacgaaccccgtccggaggatgaatatatcacccggtttgcattgcgtgccttgccattttaaggtttcttcgatttctgacagcggaatggcccaattactgacggcgttaggaggagtgcttgttggattgtggtgctgccaccatctcaactgggcatctgggtcagttgactgaaattaaaaagtagatctcgtgccaacatacccaatcaactaagatgcctcgtccaacaatgcccccgcgctcgcagatgtctgctagccatcagtcattggccctccacgacaattcgtttcacttactatgaattccgttctcgggccccttaactgcatcctttaatgtgagcccgttataaaaaaccgcttggtcctgaatcgcccactatgtatagaatgactgtaaacaccaaaacttggaagtgaggcaaggaaaaacgaacgtgtttgagactatcccactgtgaactagtctgggtattgatataaatttcatcgtcaagaccaacaaagccctcagcctccatctctttgacatgatgacacaatgtagcccgtccagatcccggaaattgtagattattcatggaccagtcaagctggacatgatttccgaattggatctcttttgctgcctcccgcaccaccgatgggctgaggaagttgagagctgataacgtcaaaaatcttagaatagggtaggaaacaaaggccgaacttacttcctaactcgtctttcttgccaggcttgtcaaagaacccccagaggcatccttgcggctggccagctacaggcgggagatcttcgaatttcgggagaatataccgtggctcccggtgatcgacattttcatacgatgccatcttatatgctcctatccagtgttgaaaccttttgaagcggccagggagacctctttaagcgcggagaggacacccttaccgagatttggggtcaaatgccgagtaatctcgcttagccccgcaacttcacttccatgatggcttcccgtgccggtggggacgagtagccagtccccccaccttgtgcttgaagaaaaggccgaagaaagatgggtcaatcactccgtactccgtaccgatatccagctctaggggcttcaaagccccaagcaaggtagatggcaacacacattactggaaaatggattgttgttgatctagaatgtcccgtcggcatcttaggagcgtcggagaaaagctgtcccgagaagccgaaatagttggcaccacgtggaaacgggtaggttaccgtattgggcagttgggtggatagtcaatatcgagtggtacaaatacttttgaatgggagtctattacagtgtggatgtttctgagaaaaataataactgtttgtcggtaaacaattctgcttgcaggaaatggtccttagaccagatcagccgtgcaagtacgaattaagtgtccctggggcggtagaaatctcccctctccaacaacctaatatgactttccctccgaatatatcagagacatccgggaaaatgccgtttttgtagcgtgattcaatatcatggtctatcacgtcttgtcgtcggagtcgagctttgatgatatccggatcgtcggatttcggcccataaagttcgctatatagtgcctcgccaataactagcttaaatagggtagatcctagggcgaagatgtcggaagcttccgtgttgggaaaatcataatctcttggtaagcagtgtgatgctttctcatagccaagcgctacgtggccaggacactgcgaagaattgaaatcgccaagtcgtagatcaaagttctcgtcaatgaagaactgacgtagagcaaggtcggaatggataacaccatggctatggatgaaaacaatagcttccaagagctgctgacaccatttggatcgaagctcgggagtgattggattcctccaagtatttaacaaagtcaccataaggatagtatgtgatcccgatatagtcggatatgccccttgatagccattcggcaatccgtggatgtgttccaagaatatcgtagatcagagcctcacgtagtataggtcgtagatcttcttcactctgactgcggggaattttccgtatgataagatcgtccaaaaggtttacttcggcgaatattccaattgtcaagagctcgtgattatcccggcgttcggaggctggtcgaatagtgacggtagggagtggtcgaatagggaaggtaggtagcgtattttcggaggactggatatcgacctaaaggatgatattaaacagagttaataagaatcatgttttccacccacagattgcaagcgctcatcatctgtaatatttttcattaggtgccgtcgaagaaaacgtaataaataggcgtctaagcggccggaggaatagactgagaataatcgtcggaaccaatgttgcgcttgtcattatttggaaaagacggtgaaacagagagaatgatgaatatgtactccgtatgttgtacgcagatgcagtagacatgtgaccgttactactccgcaatgttcgtaatttttgcacgctggggtggcttagaccgtactaaagaattgtatatagattcgccggtatcgaggtggacgaggaaaggggggaaatgagaagggaccggagctatctactctagctacgtgtgggacctgtaacttttgcttgtcatgaagttgagcccacaactcaatttgctagggttcgataacaaagatgggttggtactttatatgactgatattggcaaagcagtcctcaagagtgagccctcaagtaaacagtctggacgaggaattttgtaatgaattcaaaccttttcactcccttgaccagggaaatcttcaacctcatccacatagtgcttatcgccaatcttcctgtccttgtcaccctctaaagctttctcatcgaagggcgagttgaaaaggtcagaaatctcttccaacgacttacgcccagtcttctcggagtcagcagagtatctggaggttgacagtttcatttgataaagacttacctcgggacagtagagcagcacaaatgcaagcgttgctgaggtgcaggcaatgaaaacaatataatatctccatccaatggtagcgaaggctgtaggtgcacattgcaagaatataatcgtggcaagaaacaaaccagagattgaaactgccagacctctcgcacgcacaggtgtagggaagatctcggaggcgtaaatgtatgacgttgcatcacacgtagttgaaaagcatgccatgtggaagaaaaggaaaaagattgctgcgttgacggcggctttggatccattatgttggaaaatactaaccgagatgcattcaccaatcaatgccactatcacgccagtataaccggccatgagtagccgagtgcgtcctactcgatcagctagcagagagttgatcaagttcccgaagggggaaattgtaatccagccagcctgaatgagcagctgggagtttgttttgaagccaagggatttgtaaagcgatggaccgtagtctaattaccgttagtaaagcctggtagggtttggacggataaagtactgttaataaccaaggtggccgttccctggcatccgaagagaaccacgaagcctatgatacatcttttccgaagggcaggtgtggtcacaagagccttgaagctatgatcctccgtattttccacacggatcatactgcatagattggcaaagtttgccgccaattcttcatcgtcttcaggggtcggtgtgtctgacgaagcagacactgctttgtacgcttcccatgcctgatcaatgcggtcattgtatattaaccagcgaggggactctggcagaaacataacaccgattgtcaggaaaatagggggcacgcattgaatagccagcggtatcctccactggaccgcagaagcctgaacgaaggagaatccaaacccgatccaactagataaggcatatcccacgcagatcatcacaccgtgagatcccacaagcaggcctctaatacgaggtggagcaatttccgactgatacaaggggattaaagcaaccagggcaccttgaagtttcagatatttagcgagatcgtagcgagcgaggaaagaccataccaacaccaagcccagtcacaaagcggaagacaaggtacgcgccaatgtgaatacctgcaacttgcaaggctcccccgatggcactggtcaaggaggccagcataatcgactttcgccttccgaggatgtctgcaaatgcgatacatgacaagcagccgaaaagccctcccgcctggaagagagcattgatagcaccttccaagctactggcatttttgcgcgtatccaaatcaaagtacgagagaaatgagggctgggcgagagtgcttgagatgatactggagcaatatccgtaggtcacactgcccagtgcaacatacacagagatctaggtaggatatgagccgtctgatgaactgaacgaataaatcaaggactgaccaaaatgcgaaacatagaatttgagagatgcatcttgtgtatggagctttggtcgtacggtgtcatgaaccagtgaagcaatccctgaagagtaggaaagcagatttccccggtgtctgaatctggggcccccgggcccagctcccgggtcaccccacacccaagataccgaggaggaagaagtttatattgatcagctcaagtggaaattggctccgctagtcacagtccaaattgcgtagaatctcgaaagtgggatacatacatccgactttgaaagaaacaacgtagagaatcctactgaacgtagtttaatatcgatcccatcaaacatcgatggcacccgaattcctcctgtttcccctcggctgtttcttttttttttttgcttttcggcgactccaaaaagtggagcactggtggtttatatccacaatcgaaacgacgttgagagtaaacttcccgaaaacgacaaaagaccttcgcctcctacttgaacgtgggttggatgttcggtaaaaaccttcttgccaaccattttagccctgtagagcaaaattggagatatgcagagctcggtatctcccatgggaagctcaaattacccgcccagtcacgtggaatatttattggtgtgggtagccccacttggcccgtccgtgggagccccacaaatcacatggccatccactttcgctaaacattaactaactcgtgaagaagggacccaggggcaccacagccctgcttgcgaaactgagtgagagcaaaattttcaatgggagtagtagggtgttagaaaggagaacattatggggtgactactagaagaagggaagaaggtggaaggtgtccgcgttctagtctccgcctcagggtactccgtacttttatatcaatcatatcaatcgcatggcttcaagcaattattcattagtcaatttttagtcatcctacactaaaccctggaataaacatgagtcaagctttccctatctagattatagatctgacagtgaaaggtctgaaatagggcaagcatccctgaatacctgaaaatttcacagtacacgatagccatgtcaacccgactgtaaatcatttactggtaaatatgagcaatacaaatctctaattccgtggactgacagcaaagctaacaatgtgacaccccatagcgtggtggaggcactatgaattcatactagaaaatgttagagtgttccaataccacgctatgaagaatcttacttgatcaaaatagtctttggctcagtaaatgctcgtaaggcctgggaaagtcagtaaatagcaaactcttaaagttcgatgaacgaatgctcacatattcgccaaattctcttccaattccagaggctttcttaccaccgaaaggtacttggatgttcatctgccctgttttagccaatgacaacacatgtccaccatggaaatgacataccacactgacacaattaacacctactacaccagattctatctttgaagaaactctcatggcacgattgatgtctcgcgtgaatactcctgccatcagaccatactcggtatcattggccaattcaatgacttcagcttctgtatcaaaagtcttgatcaccgagaccggtccgaagacctcatttttgtaaatttcagcgtccggcttggggttcaggaagacggttggttcgaggaaacatccctgatcgccaatgcggtttccgcccacggccagctcgcattcattcttagcccgtgcaatcattgcctggactttttcaaaggctgcggcatctgctagtggtccgaacttggtttcaacttcctggggatcaccgatgtcttttaccgcttctttcatccgcgcacaatatagatcaatgaatttggaagcgattgaacgctggacgtagacacgagatgccgcgacacaaacttggcccgtccgcgctaagatcccgttgattgtcctgtatattgtcattatactgctctcaaccttagaggctttgaactcataccatgtaactgcattttccaggttggcgtcctcgaatatcactgccgggcttttgccacctaagtttcagtcagtaggcttacttcctcgagcttgcatcatctcgacctaccaagctctaatgtgacccgctttagattgctttgagctgcagcaacttggattttctttccggtcgcaacacttccagtaaagctgatctttacaagtggtttagtaacaattttcaaatgagctttgacggatattgaatattccttcttacctttcttactctcatatggctagcaagccgcgcccctgtactgccatcccctgttaaaacttggacgacaccaggcgggaatcccgcttgctcaaatagtgctgcaactgccaaggaacctaacgggctcttttccgatggcttcacaatgagtacatttccggttgccagacatggtgcagctttgatgaaaagggatgccactggtgaattgtaagggttgatggcaacacagacactgttagatttgtcagtatcaattttgtacagaaataaaaatacgttatgtggagcggcgtacccaataggctcatgcctgacaagctttacaaacccgtcgtcgtcagggaagtaatctccgcgttgcttgtctgtccagcccgctacaataaatattagcgtctagggcctgtaaaacgtttcaattaattctcgcagcaccctaccatagtataaaagacagttccgaatgtagttgctctctcgggtcggaatgagtgagaccgggttccccgtcgtcaaagagtcaagacgcagaatttcaggcaatttctcctcgagcagattgatcaatcggtgaaaacaagccgagcgctcggtagcgctaaacttcgaccacggaccattgaatgctgcttcagcgaaccttacggcgttgtcgacatcgacatcgtccgctatgggaattccatctgcgacaagtgtgttgtccttcgggtttaggatggaaatggactcggatgaatgagaggcgctatacgctccattaagatacaactgattgaatgtaattggaatagacgaattgaggagagacatttttgccgtgaagttgatgagaggcttcaatttaactttactagataatttccgtaggcttcttcttatatgacaaaagaacatgagatcacgaaacgccgggtagattatattcggcttctcaagaatctttatccgagaatgaaaaacaagatgatatgagttccctacaatagtccggggtccggggaaggtttggccctttcctctcggcttctcggcgcggcactttcgctccgagtaaagagaccgaacgccacggatgaactaataaattgggatagaaatctatgaaatgaatttttcgagaaagggaaaggatcaagttcacattctcaatcatgtctatgaaagctgttgttttccgaggcccgttcgacatccgtgtcgaacagaagccaagaccgcggatccaagatgatacggatgccataattcgagtcacattggcaggaatatgtggaaggtatgaagtgtaccatatctgaagatttgcaattggctaattggcatagtgaacttcacatgtatcgcggccatcaacaaacggccaccgggcacatcatggtaagtcgtatgaatcaagtgacacgacaaggctaatatcaatgaagggtcatgagttcgtcggaatcgtcgaggaaacaggaaaggatgtcgccctgtttcaccccggtgatgagatcgtatctatattttctccagtctggtaagtttacaggcctgggtatcgtttacttccagctgctgatgataaaaagtttgaaatgctggttctgtcttcagggtttaacaaatcgttgcgtcaatggtgtggcgtttggcaccagcttgctcaacggcggtcaagccgaatacgtccgcgtccctttcgccgatggcacccttcagcatgttccagcaaaactagatcgccgactgctcatcatgatgtccgacatctttccaacaggatactacggcgcacagcgagctattgagggtcttcgcacacagtataattccagactcacatctttcaatttgaaaacagcaaatgagaagctccatgagtcgaccgttgttattcttggttgtgggccggtaggaatctgtgccattgctgcagctcgctcagagggaatcaagaccgtgtttgcgattgatagcgttaaagaccgcttggatgaggctgaacagttcggcgcgatcccgctcatgctcggagaggacgatataaatgctcgagtgctggaggcaactgacaatcgaggagcagatgccgttgttgaggttgtcggaaataaacccgcacttcgctctgcatttgatctactacgcccatgtggtgttttgtcatcagtgggcttccatcaaggcgagctacccttcacaggccttgaatgctatcaaaagaacatcacgttagtttcttcccttcctcgattaggttgcccggtctaacttcatgccctagtgttaactttggacgcgtacccgtccgtaccgtgttcgaggatgcgttgcagtgcttgacggaaaaccaggagaagatgcaaagctatattacgcatgagttaccactggatgatgctgccaaggggtatgatatatttgaacagaggaaagcgagaaaggtcatcctcaacatttcgaaatagctgaattgaattgaacataatcaagtccttacctacacgtaaagttcatttcatctataaatcatgatcaatagcgtggacaattcggcatgataaggtttagcgtacacatttttggatctggaggtctctaacaccgccgatgatagcctctgcctcggcgggttggaccgatcagccccgaggaaagtaccatggcctcatttccgacgcttaatctgaccaatcacttgaggtccaaataaatcaataaccgtttaggtcaagtgggatgtggggatgtactccgtaccgtaggacgtgaatgtgttgccgtcggcttcttccaatcatcgccgcgtggttagtcagcaatccttcggcttcatcttccccgcatgcaccccagattttgactgacctgtaagtgatcccggggtccgctgctcggggacttctcttctaacaacggcaatggatatcgcaaatagggaagccgagggcccgaagcagagacgcacacgcgtggcgtgtcgccggtgtaattcaaaaaagatcaagtgcaactcacaagaggaagttccctgtaaaggatgcgtgtcaaccaatacagactgtgtgcccatagaatcacagcgagggcggtatgtgccagtgtcaagtgacatctttttcgaaacataacggggtaatcttactaatgttctgcgtctaggtacattcgcaaaggtcctagggcaagaaatgctggaaaatcgcacgtccctcagaacgataaagagataccaccaatagcccgctcgtcgaatttccctactagtggtgttgaccatcttgccgagtcggaaatacccttgcctcccgaggatcagacatctagctccttccaaagaacactcgatgcatctgatcaagacagtgattgcaggttctacttgcatatcgcggaccaaggtgtcagctcaacacctcaacctatctcaagtcaaaagggcactctctttcttggcgaatcctttagcctgacatacgtcgttcacgacgtcctggcaccccttctcagcacagagtgtgcacccaactaccgcagacgcctccatttccctgtcgatgaaggattcgatccatctatgagaggtcagcaaaatatggttgaagcgcagacaaagctgctccatagcagagatctatggttccatccagaccaacgagccttagaacagcttcttgccatatacttcaagtggtttcatccagcgttccccattctcgaaaaatccagttttttacaaaaatatagtgagaatcagttatcgttacttttactcaatggtgtgctcatgattgccgttacggtctgtgacgaggcagacttggcacttcttgggcttcaagatcgctacaaggcacgcgagcttttttacaaacaagcccgcgcattatatgagactgactccgaccctgataaaattaacaatgtggtggcttctttcttgattagtttctggtggggtggtcccaatgatcaaaaagactcgtggcactggctggggattgcaataagctcggcccagaaccttggcatgcatcgttcgtatgtatattttgcttggctcatggtgtttgtatactgacaatttattcttttgctcaggacagcgaagtctcatatgtctagccaccgagtacgaatatggaggcgcatatggtggtgtttacgagtaagtatccgcttgatcttgtcgtactctctttctgacctagtaaaacccagatacgagatgttttggtcagtagctcgattggccgcccgcagcacttttcagtgtatgattgcgatgtggaaatgctctcgtcgcatgacctggagggcgagtttcaaaatgagacagaaatacactatgtttgtcagatggcccgtctttccacgatatgtgagtattccgatcttagattcatttctgttaggctaattgacaaatggatagtcggtgacatcatttcctcacggtatgcggcggtaaaacccgatcatccttcacagatgaagattcagctcgagaaagaactggatgactttcgctcgcaaatgccaacaattttgagatatactggaattgacgcagagggtaagatatgtctatggtcagcaatgctactaatggcgtacaagttagttcccctccctcatgattacatgtacatcatactgagacctggacagctttggagtcattcttctttgtcggcctccccatagcaatggcttagacatgtctcaatcatggggcaaccctttcaaagcttcatcggccgcaaatgaagtcacccgagtgatagaagatatactctcactctcaatgggaagggtctgtcaaattcacacgtatgatagtccacccaattgcagcatgagactcggctgacccccggaaatagaatcccggcactcttcaactcccttgctatacatgttttcacgatatgtacctcgcgcgctattggaagggaactcgccgaaaaccgagcacgtacctgtatgctgggtctaacgtctctacaagaatcctggcccgttagtgggtggattctgcggcttttcgtttatatcatggagcgattgaagtccacgtccaaatcaccgactatccctggatctaggccaggtctcttggatacaggtcctcatttggggccgggctcgcacgtaactgatacaccagccgcaaacactccgcgacaggtgcgtgatggtataaacactccaaaccagcaaacacaggccagttcgcatgcagctggaaacatatttgaggatttggatacatttcccgagatgtttgttcctaatatgtttcttccggacgcgtattacgagggccatggagtgggccaagcggacttttttgatctgctacgggttcctgactgggataacatggccatatcatatagttcttgagaattgtaagtatcaaaatataatttgcctgatatactgcatacacattttctcacttactatttactctttagaatcggaggcgctcacagccctagagcttgaaaaattacccccacgcatcgcttgacaaccaaatcggcgcacgcagctctctagtctatcttacaataaacacgcaatcgcagctgaatattcgccagtgattgtgggaatctattgtgtttacatatgaccaattacttcagcgcgtgataggcgcacccagaaaaattcagttctgtcctggcctgaaagcaatttaagccggaggagaaagaacggataaaagttccctagcttaagttttcctctgctgtgttgattgagcgtccgatggtatcattttagtctaaaaagactacgatggtgttagcgaccccccaaattgcaacattcttcacaccgcgccctatcaacaagctaattagataaatcgttcttatagaaagggttatctctagtaggaaaagaaatatttctaagacgatttaacgaaattttcatacttctgttattagacggctacacttgagatctcacatttctatgaccacaatgagtacggccactgcgcccacgcgaagatggtatcattggtattccccggatgatacgccagaagagagaaagttagtgttaaagctagatctgctgatcgtcccatatgcattcattgtctattggctcaagtacattgatcagggaaatatcagtaagtcaatcaggaaaatctatcaaaaccaatactaattgcaccattcagacaatgcatatctgtcaggaatggctgaagagctcaacttcactggtaacgaattagtccatttccagactattttcacagttggcaatgtcgttgcacttttgccttttatgtacctctttccgcgggtgccgatgcactggctcgtcccaactctcgatctcatgtggggaatctttactctgctgcagtatagagccacaagctatgcagaaattatggcttataggtttttagtctcaatcttcgaggtatgactccccaactgtccgaaaggaatccatttctcttactcatactgataggcatcctattttcccggtgtgcacttcgttctcggatcctggtataaaagcaacgagataggaagacgaggaggagccttctacgttggcctcaccctaggctacctgaccgctagtcttctgcagggtgccacactcgagtacctagatggggttaacggactaccagggtggcgatggctttttatcatcaatgctatcatgaccctaccgatggcgcttgttggctacttcatctatcccgggacagtcgataagcccaaccgtctcgtgatttcagaacacgatctagagatagctcgcaggcgactacaaagacagggaacccaagtcaaaagcgcctctttctcatgggcactcggcaagaagctctttttgtcgaagcgattctggctggttcttatatgggatgggttctttttcaactctagcgctaacacagcgtcttttctcttgtggttgaagagcctccaccgctacagctccgaggaaatgaaccagctcaactcaatcagcccggcacttggaatatttttcattctcttcgtcaatatcagcacggacttgtggcttgatcgcgcctgggctattacgctggcttcgagcttcaattttacggggctggtcattctggccatctggaatgtacccgaaggagccaaatggtttgcttacagtgtgcaatactcgtccgtcgcggtatcttctgtactgtatgggtggatgaacgtcctttaccgtgacaacctcgaggagcgcgcaatcgtactggttctggccactgctatttccacaatgtggacatgttggatcccgctcttcacgtacccaactgtggaaggacctcgctttagcaaaggataccctttttctgcagtcatggctgcttgcttggtgactatgacgttcgttattcgttatatctatggcccgaatgggtaagatctccttcatctttttcacgagggtgaccggttgctaatggaatgcagtgagaagaatataccatatgcgaacgatgaaaatgtgtccgaggatgagtcgacaggcacaattgcgatttctacaaccgagagagcgaagaaggaccaggtttctgttgtggggacgattttgtgatttgattaacgtatcttcatattgtacataagggtttcatcgcttagagcgttgagaggactcgctatcggaaaattgttggcgacctgaggttctacatatttgcaggacctttctttgtaaataaatttttcttcatgacaccgtccaagtgtattaatttgaacgtgaagatataatgagtagagatcaattacttccgatttatctcgctttttggtgaaaataggtagtcaaaactatagggttttgggatgaaacaggggcagggggtaactttatacagagttttcattatattaatctactctctaattacccattacaggttatctgagaaaccgtgaaattcaattgcattttaccatacgaatcaagtccttagcctctgttcatagaaatgcttcgtgccactgatagccgagggaaggaatgatgatatagtcggtactgccaggatcacgtgggcggtcacttgtaacacttcgaagggctgagctcaacagaaccagaattgacctagcaatatctcaaagaccttgcatttagaaaagaatgttatgtttatgtaggagtcggtcgtaaagctaacaaatagaatgcttaaagggtagttgtacacagaaaagtcctccgtacagcttccactttttcccgacggttgattcacatatcttaaaggggaaatatcagtaaaagagacataacaaaaccgcataagcggcggattattcttatcaaatataactagatgtagtacaaattccgctgtacccaatagtcaatgcacgtatataccaaaagactaaagagtgccttattacccaaacaaaaaccaattgactccttcctcccatctatacaaaatccacagcattattgccaaaacacgaatggtgcttgacctagggccgattgagctgttcacggcggtaaaagagaaggaaaccaaagctaaaatcacgattagtacattgccataatatgagttagggaaaggggcgggggtcactaacctagcaagaagctggaagaaaagggcaatccagaaccacgcattggcaactgtgtccagcgacgatccaacagcgggggagatgcttgctgggccgaccttgttgggcgcgaatccacgagcacaaattgtggcgatggatccaagagactgcgcggctaataggacgaaaacgacgtgtactcgtgttagcgtttgtaggagaatcattccaagaccgacttgttggatctcgtcgagaacgccgagccagagccagacacaccgggatgcgatggcgccggaagtcaggcctccagcccatggaaggtagtggccaatgttggatgttccccaccatgtttgcgcccatcgtggtgcaccgatactcaggccgaagacgggcaagatccaactgtgctccttggataagaagcggaagagtagcatcacagcgatccagaggataataaagaagaacaggaccaggaggacaatgtaccatggtttggtgtgctgagaggaccagaggaatgaccagtttcgaccgaacgcggcggaaaggaaccaattctggacgatgaccatgaagaagaaccagaggacgattcggcggcggaagagggaggtgtagaagaagaggatcttgccgggtgcttggcgatagtacttaggcaagccaagggcaagcagcataccgatgatgaaacaaaccgcggcaatgggcatcaccacagccgagagtctccaagaattcaaggcaactgtggaaacacctccaacttctgctgaagtgaccctggaactccagtaccacagggctacagtgtagagctgagagattccctggatcatactggcgcggaacatccaatccttcacagggacggcaccttggtcaccaaagttgagagcaaagaacaaggaaccactggaagatgctgcggcataggtacctgcggcgacattctgagcccacgcttgaccgagatccgagagtgcgaacggagaaacgccaatggtgatgaatgccatgcagtagatgaaccaggggagagagaggactatcacggacgggaagcggtagaagaggaaccaccaggcaatggaagagacgcagtagattgccgcgatcacgtagagcttgactgccgtctcaccaatctggccagccagcagggtgatctgcgcagagttcgttgcgataatctgtccgagacccaagaatagagcataaacaggccagtttccgacgcgccatctcatgaagcgctggatcgcaatgggtctcttgtatcccagacgagagagccacagatcaatttcatctgtgttgttctcattcgactcttcgtgaccttctgtgacgaggctgtacggtggggccggctcgtcagtcttgtccgagccacttccagtcacgggccgctccttgggctgcttcttcaactgcgcatcgctgtacatgtagaagaacttccgctcactcttcatgagataaagctcaatacagtaatctgaaatcgagttcttcttgttgaggttggtgagctgctgttcaaagtgccgcgtgaagtagcccatgctgtccgtaaaggtcgggtcgaccttttgcagatggaagttcggttgatcatgatcaccaacaacagaaggcaaggagaggacagacatattcggagcgtgagcgaagggtacagctgaatcagaaagatcccgagtcagtctcactggagaggggtccctcgacatgaaacgcgttgactctgaggtcgacgagattgactcgccagactgattactgtgtctggggtgcgcgccgaactccataggtgaattgactgctgccatggcctcttcttgagaaatgagtttctcctgtggtgtggcagtaccatcatcgtcggcgtccgtggtatcaccgtcggtgggctcggtgaactgactaccacgctgcgacttcctgaagagacgctttctgccatgtcctggtccagaccgtcgaccaagggacaggtttcgacccagcatgctacctctgttgctttcagccacttgcatctcttgagcttcgactgcctgtagctgcagaagggaaggctggaaaggctgtggtgctctaccaagtggtggcgtatccaaagccgtcgctgactggaatgatgaagggcgggtgaccagtgcagagtctcgcaacgctggtgtttcccagaagatttgagtgtctcgcgccgtgcctgcaacagtgagttgattcttttggtgatggatctgaatagatgtccgctgtaagacctcgagcttctgaacccactcgagaacggggaatcgctgcttggcagagttttcgcgcatctcttctcgggtctctggtgttgagtccaaagcggatttgatggcggttctcaactggtgcaagagatggcgggctgagtcagattcgacagtgtaccaccaaccaggcatctggcctagaccaccaatgcgagaaccaattccaagtgcacccttacgaccaaactcaacggcaatcaatccgaagggctcgtcgcgagacgggattagggcgaagtcggcaccagagaacacgaagggggggaggaccgtgaactgtggcttcgagcagacacggcctgggaacatttccacgatgcgttcgagcttgatagcagccagcttaccataaagatcaatgataggaccaatgcagatcagctggacattaggtctagcagacaggacagctggcataacatccgcaatcaagtcaactcccttctgcttagaccatcttccgacaaatactagcaagtcagcgctgggatcctcgtccagaccagcccacttctgtgcctgggctttgtcattggcgtgctcatcagcagactgaaccgtaacttgcacatcggggtccttcttcagggcggctgtgtcggagggatctggattaggaagactgccaatcttgccgaggctccagaagattgggtaacgggcccatgagcgctttccgtatttctcagacacaccgactgcgccaaagccacgttgatggaatcgcaaatagctagcaccagtgtgaagcaggttgaaaacgctgccaaactgacagtactttgtggccacttcgactgggagattgaacacagcacagacttctttcttctcttgtgcggtcctcagagcccaaagaccttggaactcggcattgtgcagagacaaacagactggaatagttcgcgacgggagcaggtaaagcggtgccacgcagccgtggaaatcgttgatgtgatagagatcaatcgagggtgttcgccgcattacctctgcaatacattgattccaggccgaatagtaaatcgcactgtcaaggtcatccatacgtggagggtatggctcggccttggtctgctggcggaaaaccggagcatcgagtagaacataggtgatgttatcgacaacgtgatactggaccttgactgagtagggatgatctaggatcgtcaccacgaaaggttcaacaggcgtatcctcagggtagtcaatatcgccgacacacgggaccacccagatgagattctggtgcttcagattttgggacatgagctgcgccatcactcccaggccaccaatcttgaccttgatcttccagtcttgaatgtcatactccatagtggcaatcaatacagtgcgtcgttgatcgctcgcgcctgccattcccatgattgttggcggagccttttctgccatattgatctcctcgacaccatctttggaaaacgttcctttgattctgcgccaaagcactaccggaaacttctcggccttgacggcattgccattcaggttgagtttgacacggtagaagtttccgatgaagataaagacaccggcacagcccataacaagcggaataacccagaaaagaataaagaggaccaactgggcccatccagatccgacgggaatcagttcgtaccttaggttgccatcgtttagggagatggtccagccaagatgcgggaacggtggcagaatggtgatgttgatgacgttggatgcgagataggacggtggaagcttttgaactgaagacgagttgccgacgtcaccgtagacctcggtattatcaggagtgccctctttgtcctggccccaaacgttcagctgacccacagctggccattcgtagacgaagtcgtaggtccagcgagacgttttggaatcgaacttcatcttgctgtccattcctgcatcatagccatattggttatatgggccgttgaaccaaatgtgcgggaatcttcggactgtggtgctcgcataatcaccttcctggaggtaatcactgcttccagtgagcctcgaaaagtactgcacccggatatgagttccgtcccacttctgggcgtccgtgccagtccaggctgggatggtaatagtcgtgttgccacctgaataagtcgtccaatcggtccagctcagaccgaaatcagccgtgtatcggaacttgtccgcaccagcagctctgtgctggatgtaaaggtcatcgttggacttgtgcactaggctggtagagtaattggcaagcggagaaatcaggggattatcagaagcgccgaggcggatcaagaacttgtcggtcgcattggtgtaaactccggaagtggaaacattttggacagtcaattggtggattccgtggtggacgttcttcaggtttgcagaccatgtccaaacagtcgggatttcgccggtgaagttatggctggtggtcctggcagagatattggcgcacttgacactatccgtatcaagcacggcggtgatgtttttctctgttgtagaatttaggtaaatggcatctgtgatgctgctgcagtccattgctttggaatatccaagctcaatgggcagggtttcgcccgtatcttccgaagatagcaaccgagcatcatgtccgggatagaaatcggtgacggtagggccgggttcgacgaagttagagctcttgacataggcccggtattcccatggaagcagctccattttcctgacgcatccatagaggttgacgttgtctgccttggcggggccatcctgcagggtgagctcatcgtaaggataaaagaggttcttcaattttgtccctgagtcgaatggagccaataaggacgtattcttatcgctgcagttgcccccgtatgtgacggttgagtttccattctgatacacaagccatagagtttcgttggccaggatcgcgtctgtttgtaccgcagggaaatagcttcgcaggacagaccaaaggccagtgaccgtgggggtggtagaagaaccagggaggtagatgtcttgtgtcagttcggagagtgtttcgaggtacaagccatccatggcgaccgggtaatgcgcacggatctcgaacatgcgcttcatgatgttacgcagtggatgggcgggattccgctggtcgtacgtgacagtgatatcattgcagccatcgcgacccttttcgatggggaaatcgtagaactttgaggtgttcaagttgaagcagccttgtgtccaccacgcggtttggtacgtcatgggttgccgaccgaacatatagttcgctgcggtagcgtcaaacacgtacatctcctgctcttctccccacaagatgagagggattccaggcagctccaatgtgatgatgtacaaacccaggaggtatttatctgtgccattttggagagctggccagcggaaattatcctggttcgagacaccatacatatgtctcggatcaacttctcctgtgaatgcattgaggaaatcgttagtgatgagcatctcattccaggcttcgatgaaatcggtaggcaaatcaaagccagcaaccaggttaccgtccatgcctaggaaacgggtcatcgaacggtaaatggtatagtgaaatgcggaggcatccaaagcttgcagcccatcgtctctcaggaacgccccatccgagctgttcgtgatcttgatacccgcgcctgcattggctgtacgctggtttggttggcggccgcggccgaggtagagactgccaaagctgtctccagatgtgatctcgccggggaggaagaaatttttcttgccgagtgcctgcgcgcattcacggtagacggccatcatctcactcaggggctcgagggtcgattgcacagacttatcgaagcggaaaccgtcgatgtctagactcgcgatttggaggcaggaatgttgagtgatcacatcgcggaccggcttgtgccattcacgtagacgatcctgcacggaggcgaacttggtaagttgacgctgccagtcggggaaattaccgaatgcctcaagctctccgtattgatcgaaatcgctgttatagcaacccttcaaattttggacgcccgaggtggttaatggatatccagtctcatcccagaacttgggatagctgcaagattcgttatagtcgttaccgaagttgaaatcggcatattctcggtcggtgacccattggacttcatattcagatgctttgaaatcggcggaatcgttcagatggcctttgaatccgatgaggttgctcattctgtgttttgatcagctcatgaacatcccaagatgcgcgaagatcagagcatgacttacgttgccagtgtgttatccaccaacacatacatctcccgtttgtgaatctcctccacggtccgcctccagtcatccagtgttccataatgcatgtcaaggagggtggtatcgaccggcgagtacccatcgtaggcccagggcaagttcatcaagtacgttccggcgaagtagatgaccttgtcggtgttagcgatggaatcattaagaggccgggtccactaaccttgaatcccattccctggatgtagtccaacgtatctatcaacccctccagatcaccaccatggcgcatctgattggagttgaccacatgctcaaaggcggtcccgttgatatcgtcattggtcgggtcgccgttggctatacggtccaaaaagattgtatatgtaggcatgcgccagttatctggcgacggatgatagtcatggtccggccatgctccccaataatcgatggggctttcggcggatttgttctcgttgagattgtatttagcgagtggtttatcgtagggccaggcaaaggcaaagacgctcaaaaacgacagtatgaggaaagctgagcgctgcatttccgtatattactgttatcagcaggaacctgctgccggaaagatgcgcgactcaaaaaacgaatggatgaatttttgacaaatagcgagagtaagatgagtgaaagaacgaggaatcaactgaaacaagcttccagcatagtgatttgaaaggttttacagaatacaatttttactaatgttgtatggcgaatacatatttttactatggagaacacatccttatcgggccgaacggatgggtggcttggactatacatagtcccgtccactacgacccaccaggtgagattttatctatccactggcttttcgccgctgcttggctgcttttcgggtccatgtctcagatagatccaggatttgagtcattatgagcaggcgaccttgggttgttgtggtctaagtgcgcccaaccaaggactttaacttgactatgtctgtagtatgtgtatattatgtctatatcgatgtcttgtacacctcagcaggagattcatgacccgaagatgggcttatgcaaagtgcaattcttagccatacagctgcatcagcacaccgcatcatcgcatcactgtatggcaaaaggcttttgatgtacctaggtccaagcacagtacttcgtattcttttgttcttttcatattgaagtgtatctatcatgcaagcaactggtaatcatcgaagcttatctttgtaattaattaaaagggtttaatccaagctattcgattctactccctatagtactccatagacacgggacgattagatattgtcaaacgaggctatcacttgatcaacctggctctaacacccccccaaaaattaatgaaaaatacaccacaatccaaatgtctgagagacatcctgtttaacccaggcattcggttacagggtggtatattggtgggtttgtttccattcggatccgcccgccttcgacgtcacatcttggctgaccggccttttcgaccactatcgccagaacgtcgccagtgtgaatcaggaaataacccactgtaagaacttggaattcctgcccgtttaatatatgtcttcctgctcttggtcctcccagcctgcttcagatgtcttcccatgctccgattaataatctcgtatcccgtgtcttagatagaaccgagcaaacccaccctcccatatgtacctaacaattcgtcaccccctcttgttaagaccccggagaaaagtcttatcccggggactctatgccactaatgcagtgacggggcgtgggcatcgtatagaatcatgatatttgcttttgccgccctcaggtacgtaaatatacgtaagcagcgttatcatccgtggatgacttgcgcggcccagacgtggttctggatgcatggcttcgacgctttcttggtcgtattgacaataggggtttgaagcttattttatctacttggtaataccaagcgaacgcaacgttctaacctctactgtatatacacccggcgatacttgatgacccgatacgaacgtaccgataagagtagcttaaatatatcgagtcttgctatatatagccgaaggcgataaagcattgattggaccatgcgacccatatgatagctgtctttgaacgcctccattcagagtggagcacggttctgttcacttaattcgaacaatctgggtgatactcccatggcctgttcagaaacgcgctagcgcctatttgatctagcctggggccgatcgtcatatagcgtgaggaaatgtcttatgtatgccacgctggagcctatacggaggatggtaaaagaggatgatcgtggcaagcccaccaacccaggcccaccctagttgggggcaccaccggatagccaattttgggcaaattttcaccgaccaagttgtagtctcctttgtgtgtgggtttgccacgatacttagccctgccattactccagttgcctccatcccattactttgccctaggcattgacctatgagcaaactcggatatccgaagttcccccattgttcggttcgcgggcttaagtcggccgttccgacaacctgatttcaaaaacgcatttcggtgaactggggcccgaggggtatcccgtattgtgccggggtttggagggatttggccaggtgaggctgacaacaggcgtgaatggcttatttaccattggctgatattgcctttcgcctgactctccgccttcctaatttatacacacgatagatctgggtacccaatctccgattcacgacaactataccccacataaccagatcttcttcgttcgcacgcacatctttctttgctcatgtatctttataatatagatgccccttacttgaacttgacgcatttcaaagacgaggttacctctcgctttgattcaagaccacacacaatactaatttttgggcacttgaaaaatctttcataaaagatattaccatggaacaatacaaggcctagacacagtccactgggtcaattgttgccttactgccggtacctgggcctggggttaaagaccaaaccccaagtcgcccgggctattccgtactcggatcaaaacacccttcgcggctagcgcggagtacaactttcgaaagcatggcgcatgagaagctctatgtagttacacaggattcttgaccagcctataggatcgtgcttgtggacagtcataatgcgaaaaccgcttcccagaacggcgaggtgcataaccgattgcatacaaggcatgatatatattgcgagaatccacaaatatcgcaacaatctatgaaaatcagatcgtggggtctacggacatatccaaattcgattagtccatggcatacacaatatgcttcatatgcgccccctccagggctaatgccgtacaacatgattggaataatataaagtcgagacatcttcttggaaatcatcatgttcagatcaaaattcagattaattcacgcggaagatggtgtctctcacatccaacatatccgagcacctgctcttggtggtgtacgtcgtacttgcctacacaggcatcaagataatctaccgcttgtatttctctccactggccggattcccgggtccacgcttggcagcagcaaccagtctctatgagttttatttcgacgttgtgagaggaggccagttcatgttcgagctggaccgtttacatgacaaatacggtcctgtcctccgcatcaatccctacgagatccacatcaaagaccccagcttctacgacactgtctatggcgggccgctaaataaaagagacagagtgcctgcgtttattcactcgggaatgccccgggcaaccttcgaggctgcgccacataatctccatcgcgagcggaggaagttattgagcccgttcctttcgacgcaatcggtgacagatctccagcctgtcatccaggagaaggtggatttgatctgcagccacctgtcgagaagggtcggtacgggggagttcctggacttgcactctatctttgcttctttcgccgtagacgtgacgtctacgtatgtgcttggccctacgaattgctataactacttgaagaacacagagatcacagacgaatggaagcaatatatcaccagcatcttcgagggcctgattcttctcagacatcttccattcctggtcaacccggcacgtgcttttcctaagattgccaccttcttctttcctaccttcttctgggctcaaagatgcgaaacggtatgtatggttattatctggaatgcaaatatactgatagaggattagaaaatagatagaactgttagggctgcgtacgaaaaaccagacgagaagtcgatgttatcgactattctctccaataagaaactgcccgacgaggaaaaagaactcgaacgcctagagcaggaactgaagtttctgatcattgccgggactgacgcgccttcccaagtgatggcactcactatgttccatctcctttggaatccagagatatgccaaaagctcaaagacgagttagatgaggctttcccggttctgtccgacgcggactggactaagttgaaatatcttccatatctggtaagcagtatcgatccgtatttttttcatggactttattaacaacgtgcaagtctgctgtattgaaagagggtctacgaatttctgccgttgtgacatcaaggcttccgcgtagtgcaccagatgaggctttgcaatacggaaaatggaccattccacctggggtatcttgtactcagtctaccaatcttgttcctggctaacacattgctctagacacctatcagcatgaccacccactccattctacgaagtcccgaagtctacaccgagccgatgaaattcatcccagaacgctggatgggtcctcccgaggaagttcgcgtactggatagatatctcgttccgttcgcgaaaggcaattcaagttgcatgggtcagaggtaagtaccttccagtctcttaaccagttccagaccagcggcactgatatatactagcatggcctactcgtggctgtacgcagtgataggtaccgttgtccgcaagttccaattggagcttcacgaaaccgacgagaagaatattcatattgttcgggactgtttcaatggacagacggtccctgggctcaatttgattaatgtgacagtcgctaaagagttcaactagaagggtctgcatgtgaattatcggtctgttttgcatcttgattagatttcattctgtcatctctcggttcaactttcccccctggcacttggaattacctgcttatgctttgtctcatagaagaatagaagggccaggaaacagacacaagactattataacacgcattagaaaaaagcccaaatcaatatataaaacccacctgacatccccaactcacattcaccagtccctagactatctatcccctagtcccaaaaacataatcccgatcaacagccagccgcccagccccaatctccctctgataatgctcgacaagcccaataacgataaaaatccagccgcgctgcccaaggtccttatcacaattcatgacgggaaacgagacatacagctcgcgccggtgatgcatggcctcgtagtgggtgatctcacagtctccagcgcggcaccggtcagccactacgtccatcaactcttcgtcggagaagaggtagtctgtgatggatagcttgactgatacccaccacaggtccgtcattgggctgaggttttcgtagtggggctgtccgtttgagaggaagattgtgcgtgtgtgctttagggctgctcggcgtcttgggcctatggggttccaggattggggtagttttgatctgaacatggcttgatggtggtggggtggagttggggtttgggttggtttggatggaccgtcgccgtggacgtgatggaactgcttcttgtctgatggtgtgtagacttggcgagggattccgaggttatttaaatgcgatgtagtgagacagtggacagttctatcgagagactgtctttgacatggttgggagagaacaaagtcttttatgtgaggttgttaacaatggctttgttggtctctgactagttaggcaggtactatgacaatgtgaaacgaacaaagcctcgaagcctttcactgcttatgattcgaaatcaaggattcaagaacaatgtcgatcagcgctctcccttaaggagcttgacattcgttagtctgacattcagttcttctaatcagagaacaatgagatttctctgatggtatcgatcagttcacactagacttagatagtatattgatgtcaaacctagtagatcatccattctccatcgttgaaagtgaaaattttatgacttttaaaaacgtctgatcttgctgggatggaagtatccagtatgcagctatgtaagtctcgacaagattacgcagtttcaaaggtcatacgtagaaattcgtcaaatctatgctttttacttgccgtttatgaaacttaggaagaagatatcaaaagaaaaaaaaatctaacagactaatcacgtcgttctcaaaatagaacgcggccgagtattcttacaatgaagaggtcgtgcaagaagaattgccgattggacattgttttccacgttgccccaggaaaaaaagagagaacagatgccaaaaggctagccacaaatacaaaggaacataaccagcatgaacagagttcattaatcgtacctggataccgcgtaggggttgatccaaataaacttcgatgcgtcattttaatgcatgttaataagccgaaacctctgccgaggtccagagcagagcctccaataccactactcaacgtagttggcagggaaaggtcccttctgtcctctcagctcgccttcccaccagtcatccgtgctatcggtcttccgcacgacgcggatgcggtcaccttcccggaaactcagatcgccattcccctggccgtcaaagtcatacagcgccgtgacaaacactggacgggatgacggcggtggtggcgggggttttttcttccctatggcggcagccatgggtgataccttggcctggaaagagtctacattggggccggcaggtgatctgaccactcctgatgaaatgggagtggcttgtggggttggcatgaatgtaggacgagggggctcgaagtagtcaccgcccgttgcgaggggcttagatcctgcggcgttttcaacgggaattgcgctgctcttgtgactgagcgttgacaggggcggagagggagggtattctggtacacagggtgtctgggccgacgatcctggtgtttgtgagcctcggcggtaagacgggagcgaggtcgatgaggcattgctaggagcgcggcttccaattgaagggcgtttcttattgtcgtgctcggctgcagctcgacgcatggccttgccaatggtcagggagccgaagttttctatttcagtttgcacaggtttgaaggcaaactcccagtcttggacaacttgttccatgtctggtggcggggaggggaatccctcttctgcacaataagtgtgaaggactgtgtaatagtttgcaagcatgcggttttggatctcgacctgtgtatcgaggaaatatggcgtcagggagaatatgagagcgattaatgttgggagtcgctgtcgtaggtcctcgtcggcagcttggtaagcctggatggcgattagtgtttcttattctatgaatagtattgggcattgagattgtacctctttcgtatcggcaagttctgcctccgctttggccaggttcgcattgtcgcggtcggtgcgctttggctttttcatgaggctatcaacacgtccttgggagatttcaaagtcggtctagaattgggatattagaactaatccaccaagaacgtcggtatttattgtgtaccttcttgtcgtttcgctttttgatcgtctttttcatcggcgcaagggattcctttgcctgcgaagccggcttggtcatgcgagtatcgacagcaccgagttcctctatgaggtcgttacgtagttcatcatattccttgcgcagtcggtttgtccgagctaatctgacggggtcggtatccacggcgttgtggttggacggggtttctgaggaaccaatgataggaccgtagaggccgtcgaattcatcaataaggcgactctggtacgttgcgatagagatccaagcatcacgccaggattgggtagattccacgatctgattaaataacacgtatcaggaaatgcgacagaacgcgcgtcatcggggtaacattgtctaccttgcctaggagcatatctgcatcgtcgaagtcttttaaaagcacagcaatttgactgtcatctgcagacgacttcgtcgtcatgcgaccaaagcgtctcgtcatgttctgcatgttgggcgatgagctctcagaagctggggaacgcggaacgggaagagaggggatgacagaagcgtgtttgaaacaagagtgaactttaattcaagtcaatattaatcaatgtattcaattcgtccacatccaatgcaaatgcaaaatgtagatgatggggaagaaacattgaaagaaaggaaggggaacgtcccatcccctcatgacacataactcagccccaatgcgtttcagcctttcatgcggctcgtgccacgacccctccaacgtatttgacctttcgggaaggagacaatgtcaatctcctgaacccttctccactctggatagatcatattaaatccggttatccatcttatctcgtcgatgcggaatactagtatatgccctacagagtacggagtacggtgaggcattatagtacttactacttgctcataaaatacagtataacatacacatattccgtacaagaggcgcagatataaacattgaactctgggaatcgacgaatccatccgtggacggacaaacttaacctgctgagctcagaactctatatctttcacgtgatccggatcttcatttatagttgccaacgtcaataaccagttaatgtaacaatgtcgtattcgtgttctcttcggtcataatccaatataaaatacggagtagtatccccgatattaggcaacgatcaatagctctttctattccgggtatggcgccctcactcccacccccatttggtcctagcctcacccgttttaacagctaaccgtgccaagcgcccaacacgcacttggcacggctaggccgctcgccctacggggtacctttaacggaccgagagaatgaaatcccacctttgctacatagaattggggttgtttaacgtgcaaggtgaatccagtcgagaataccttatctcgttgtggcatcgtataacgcccaagtctggtttccaataaggaaaatatcacctattccaatctaaggaatacaaggttgtatagcaaaagtaatccacaccaaacaattaatttccacaagtgagagtttttcctattcatccaatgagaatcaaactccaaggaaaaccacattaatcacgcattgttcaagccttcatacggtacctatacaattggcactcgaagccaatcttcttaggctcacccgaagaaagcaagtcaagaagtccgcgtttctccaggtcttggcagagttcctttttcaacagaaattcctttctattcccttcctccatgtgtcccactctgctacttccttccgcttcagttccttcgttcaagaaacgattcgtgtccaaagctagatcagagactttgccatatttgttatgccaacatttgtcgatgatatcgtcaatccgtggattgccattcaattccggaaactccatgttctgtagcaaatccacggtcttaggaccatgttcgtaggggtcctcggtaagacagcgatctccgtaaacctcaaatccgtagttgatataatagtataaagaaccgagggcgaactgctctgtccgcgagccaagggagccggaacttccacaaatgccttcatccggttcgttgctattaaggaatctgccatatggacctatacaagcttcgtgatccattccgattttcgccgtgcaatcaaagtcggataatttgagtcggtctcgatcaagtagaatattttcaggccgtagatcaccgtgagtgaggttgagagattccaggaaagcgacggcttgagcgagatcgttcatccattcctttcgtagggatagcggttccaacttttccactctagtaaccaccatattttgtcggttccaacttttccactctagtaaccaccatattttgtcggttccaagtatggttatcctgtattctagaaaatagcgacccgtctattataagtggttagaagataaacctatcagctagtgataaaggtcacacctctcatgtactcgaggaagatgcctttgtctgaaatatgaaaacattgcacgataaagggacaaggcggattttgtgagaatatgcggtatatctcgacctctttgctgaattgttccctttcctcttctcctgactgcgggaccttgaccgcaatgcgagggtcgacctcgtaaacgaaagagatgcctcctttccagatccagtggacactagggaattggtctttgatatccatgacgaaaatataatgtgtaatttgactgtttggagagcaggacagaagcaagtgtttcctgtgattcaaggggaggtgagcagaggggaaaagcagggccaggcacagctgaaccatgaaccaatgatgatgactcccgctttccataggcccagccctgtctaattgtaatcgaggcggatgcgctggctagtgttatcgttacgaatcagaagtctggaacatccctgagctcctgccctaaatggcgtagcagcggtcatgcccttgtaaattgttgggattctatcaacacgaactaccggcatttaggcttagtacttttgatacaactttgctttctctgcgctcatgtttgcactcagcatgactgcatagatcacttatttcctttcgcccgagagaaacagtttatttaactattgaaatggaaagcgagtacaacatacgaagtatacggatataggctcagtttccaggggtttgcaatatcaagttttatacatactattcaatttacaacaatcccaccaaaacatatactatgtagacttagactttatatctacagattcaaaaaagagtataacaacagaattacagtatgagttctaggacgactgaattctgggcatatacaaacgtcttgtcgtgatgctctcaaagttccgcttcatccatcttcaacaaacctttctgccaccacttctcctcctcttccacggccgctatccgactctttgcctgccggaatccatgtccctctccatggaaaattaccaacttaggatgacgaccagcctttttcatcatttcgaccatttcctctgcttggttcataggaacgaccgtatcctggtctccttgaagcaacaacagtggcgcagtaatcttatccgctttgtaacagggactgcgttcgcggaaaatgcggtttttctcggcttcatccgcatcagaatcaaacaacaaggcgaatgcgtaatggctctcgaacttatgagtatcctcacagagcgccttgacattgccgattccatatagagaattgccaccggcaaagagattggggtagtcacaaagagcttggagtacgatgtatccgcccgcgctttggccgcgaacaccgactccgttggggtcaattcggccagacgatgccaggtatgacacacaactagcagcatctgctgtgtcgaggattcctaataactttagtcagcattggagggaatggaataatctgccatgagaagagtgaattctcaccccattgtccattcaggatatcccggtatgctctgccatatccggagctacctccgtaatttacccagacaacagcatagcctcgggaagtccagtattggtccgtgatatttaggccagttccggtttgcgatgttggtccgccatggacgcagacgatcaaaggcggcagcgctccagaaggtgcttgataatctgggttctgaggtgggtagaagatggcatgtgccactccttccaagctcttaccgtggactcttggaaaagatagatgctctggcttggaaacaagagaacttggcatggggagctcggaagctaccctgagtggagtgagcttgacggtatcggcgatgttcaatgtgaagacagtgctgaagcttgtttcactggaaccaagaagggcgatttttgtgtctgagaggggattatctgccaaaataaccgtgtccgccactggcacattcaggtcttgccaggtatcattcgacagatctatcagaatgaagctccatcgagcattcttgttgtacgacgcgatcattagagttggagtcaaacacacgtatgtgcagctgtcaaaatgtaggtcagtcatcaaaccagctgcctcctggggtcaagactcaacgtactttcctagacgccagtctggctgcgaaaattctacctcttccaggccatgcagggccacacgctggctttccagagtgtcaaagttgaaccgatagaactgccaataccccgaaacatcgctcgtgaagtacaacgtgttatcaaggccccatcgtggctggctgacactttctttcttaggcacaccatgcacatggtgaacgtctgtgacctcaccattgttccacttagcaacatacaggcgagctcctgtccaaggcatatctggatgagaccactgggtccagcatatcttgctgccatcgggggaaaactgagcagcactgtagaagtcgtcgccggaggcgacattgactatctttttggactgcacgtgtaccgcgacgagtcggttccgaacttccgccggcaagggcttggagtggtcctcttcgatcgccaagagccatcccgagtccgcctgactatctgacaaagagcctatagcagaggtgcatgcatagcggagatcagtgcctgtcgtggtaagctgttcaacaagaccggtggagggatcgagtttgtgcaaatcctgtgtctcccgatcagaaaagacgacctgtccgttgaaggcgatcatcgatgcgccgccatattcatgaactttggtgcgagcgtcatatctattggactttcattagagctgggttcatacatggctagatctagtatgtacttggccggtaagatatcgcgtccttcaaggccagagtattcaacgacgcagcctcgtccctgctctccgggtcgaccctcgatgacaaaaacctttccgttagatgtctaaaggcgccgttaaaattttgggcatgagcgaaattgaggtttattgaacataccgcgatggattcaaactgaacaccgctagcgccaagcaatgcagagctgattgggctcttccattggccgaacggagctgtgactggagtagccatggatattctagcaatagataacttattcgtcggattgatcgagttgatagtcctgttgggaaagtataatggtataggtgttgtcagcgttgtgaggcgatggtggaaaacagacagtctaccccgcatagcctgcaacatagtgaggctggctgaaagttcagctgagattcaattgaaaacgaccagtaataaataatgcaggtctctagttcaaatcttcttttaggcattcacaaatgactcttgaatacctgtctttatacctacaacatatattttccaagattgttgcctgaggcctctaaaccctaccttatcagcttatcgtttccactttcaacgcgaaacaacgcgactgaaaccacatttcgcgactccatgcgatgcgggcatgatcaaattagttattccacaatgccacaatgatgtccacaccgtcttcctccacgcgtcctcctccgacctctccgcaggtcactgcctcggtcgtgaaatttcgctgcctgtacactcacgacttacgccgcaagtccaaacgatggcacgacggacacttacgataccataaacacaacaaacgtgttatggtatacgatgaccagggtaattttatcggtgaccaccactggcgatccaccgatgaagtacaagatggcgacgaaatggagctggacaagggcgtcctgattgaggtgaccgagaacatgggcacgactgagactgatatcacaacactgtacgaaaaaaagaaatcaagccagggctcgccgccggccagagacccgcgctccccctctacctacacgccttccgcctccgtacctcttcgcggttcccagtcatttcgctcactttacgatttgctgggcattaaaaagactccgattgggcatttgatctccccgcacgaggaaaggaatcctccgcaaccagcctccagcattcaggaacccgaaagagcaccgaagcgacagaagacatcctcggtggtgaatcgaggcgagcaacgctcgcgtgtgggtgaggtgatcgatttaaccgattcaaccgattcagttcagggactctctgagagggaaaggccgaaacaaccgaaaaaaccacatagagctgggggtgattctacggctgatgcagcactcccggtaaatcgtgagcagaggtcgaaatcaactcggccacagagacccaatcctccttcgttctcaagcgcctccgcttcaactgcatctgaaccgatctccagtctaccaacaaccgaagaattattccgtacacccgccaagggtttccaacctgcaaggtcactaggcaataaatcgaaagatgacccgccacctattcaaccgccaaggccccgaggcccctccacaagttcccttcccactgtaaccccagaaactgaaataccgaggccacgggagaccttgcgcgtggagcagccatcaatcagccgcgaaaatcgatcaagagctctgtcacgtcccatcccaccacagaggtctgaccctccggcggcttcgaggagctctctcacaagcgcacccaaaccgtcgtctgctagatctacaccacagacgccggtgcgtgcagtcagcaattatgtgaaccctatcgaacctgtgtgtaatcaagcttcaatcaacgttccagcatcagtcaacattccacctccagccaatgttccacctacagtcaacataccatctccagcaaatatttcatcttcagccaacattccacttccagccaatgttttacccacagtcaacgtaccatctccagtcaacatctcatcttcaacgagcatgccgcctccatcacgtccatcatcgacactacgctctggggcacctacatcctccctacgcatgggagtcgggaagccacgcaggaaactgatgtacagtgctctattgccgggcgcttcacgaactccatcgccagcgacctcagatacatctcctggtagtgcaagtgagcccgctacaaataccccagagcaacagttagtacggtacccacccattaaccaaaattgtgatactgattctgtgcaggctggccgccgttccaggtgattcttcgatatcaaacgaagagtttatgccctcaagctcgacacaatttatcttcgacgagatgatagatggatcagggttcaaatcgccctccacaatcaaaagcctaaccgggaaaagatctctcaattcacccttgcgcaagtcgatgtccgacccgattgaatcgactacccgccaggttcgagcaggaggaccattacacgcggctaacaaggaaaacgagcccagagagcaaggcccttggacatccgaggccttggatttgtttgacttctggcctgctggacgaccaaaaccaaacgaatgaattacgtactgtggctcggtttgagagctgggcatgaggttctaagcaacaatgagtagggttcaaaccagattgacaacacaaagacaagagccttccaaggttcttgtacctcacgatgtctaccgtcttatgggaagcaatcaccaagtcgccgaaaccgttgttctcgaaaactcagtgagttttccgtagtgttcctgcgagggataactacttttcaagatgccaatcacaagtgcacaccttgcgaaaacagtgcttgcaattcgtgtcggggaaacccatgcattcatatccacagacttccttccccgcctctctccccaatccgtcagggcttatgatttagaatgcttctcttcatgaagctttatgttatctgtttgtccgaaacaagccttcgagacccagaacgacctcgatgctcttattgaaacaagggaaatatgatagaacaaagatacccatttaacattgatgaaaaataaatctatacctaacgcacaccaactcatcgaacttaaatccccttcttaaccaaaaccccagaaatataaggcatagccgaccactcaaagctcctctccaactccaccctctcccaccccccatccccatcagccgcagccctcaaaacggcttcagtatccctatccagacaacaatccccaataaaccaactccacccaagaaccccatacaaaccctgcacaacccgcccaacaaccgaccccttcgctcggcgccacgggttaacaacatgctcggtcacaagcaaccgcccaccaggcctaagcaatccatacaactcccgcacagtcctttccatctccggcacggagcacagcacacgcacgcacaggatcgtgtcgaagattcccgcgcgcgcgtcggcgtcgtacgcgtccacgacgcccgtgcctgtcgctcgcagggcggggatcagttcgcgcgctgctacgcctgtcggcacgatgtggtacttggcggagatgttctctgctaatgcttttgcgcggatcgaggagtgcaggcttttgcagggctcggcgccgtagagcgctgttattgagggtgaggttagtaggggcatttgggtgccggtgcctgggccgatgtcaagcactatccctgaggcggtgcggaggattggggggattagggctgaggagccgactggctcggggatttcttggttgtttgggtcggagctcatttggcgggaggctgttgatggtggtttggttaggagttgtgttttatgtgtctttatgtattctttataggacgttacgtcttgcggtttttctcgttcatcttgtagagatttctaagagcaagaagctcccctctgggtttgttgatgtgtggctgggactcactggtgaactcgatccagaatcttccgaatgcttcatcgcgaagtctctgggtctgggtaattggggcgaagagctggccgtttttgaagactgcttcggcgcagactcgaatgtagtctgtattgcagttagtaatgtgtaagtttatatcagatgagatattggtgctgatgtgcggagaatgtccaacaatataccagacaaatacagggagattcccaaaagaagaaaagacgatacgaaaaggaatacagcataaagtaaatacaagcagagtgcggattgagagcacatcgatcggcgtccaattccataattgatatcatagccattcggcatcagttcgacggctgtacttacgcgacatcgcccaagtaaggatatatgctggctcgaacattccgagcattcgcccgacgaacggtggggggctttcggttgacattgtagtcagagatgttcgaaacccgatttcgccaactgcaatggatgctaagaggagaaattacaagaaaaggtttatatagttagcggaaatgccccacgtgactggggagctttgtggggtcggcgataaagtcacatacttagctgactagggctgtggtctgaagatgaccaatgaatgaatgacaatggcgtgattattccgatagataattataatctcacgatcatacatcttacgagatgaaaagtaatcaggcttaatccaacaaaattgaacatagactagtatctagcatcctggattggtgcaaattgcacaagtactcaacagatgctccggaagaaagagcggtgcctatcagtacaaagacgacggcatgtagtggtcacaaggattatcacataaaaggagattataaggaaatagcagactcagattgggagaaacgttccagaacggaatgattgaacgaaggacagagacagaacagacacagtaggagaattgagatctgtagagagcaaaaaaagaaaaagatcgtatgtgagagaaagcggaggaagttaggtgaacctattcagggggtcggagcgaagagtccagaatcaccaatgagtacatgagtctcggtttgaggtatgagggattccacgctcgtgtgaaagaagttaggttggagacactattagaagggttgctggttggacaagagacaaaataaaaggagactcgtcgtcattatctttataagtgactcgagtccgggttgaggacctgcccacaaaccctacgaacaaatgccaatctcattggatgttcagcgatggtggggtgagtgcatgcggttgaccctcgggctgtaccgactggtgcgagcaagggagccaacgtcgtgttttccgtcgcaacaggcacggacattttcaagccggtcttgctcctgggtttcgatcacttgtctcagatcatcggcactttcttggccatgaagaatttcatcgttgatactgggagattgaccgtgccgtaccttcagacttgcgatggatccccgaatcgaacttgagatggtgctgagtcttgacgaagagcgttggcgatcatcgggaacttgcaacgacgagtttggcacgggtgagctgagcgccggtgatgcacggccaccgagagtcccggaagatcgcatggacatcgccgaggccgctctccgctgttgcttggatgcatgacgagcggtgcggctattgtaagatgagaacgacagtcgtgcgttctgacgagagctagaccggaagcttggggggttgaactcgttgatgtcgtcaagggatacgctgttattgtcctcacaggtgtcgttggtctcccttagaaggaggtaagacaacgcattgaaccacgtctcatgcctctggctcgttgtagccgtaaagcgaactcgtcggccaggactgacaacctccaagctcctgcagtgaagacccggaggataggggttgtcgtcggcaaccactcgaacagcctcaatgggcacactcttggtacggagctcagtctttccggcagtttgtgggtcctgcgtactccaatacagagttcgggtatacgggtgaacccagaagtatcgtcggtgccgtgttgtggacatatccgacgagccggtcttgcgagtgtatttccaaaggaattcaccaatcatggtctgagtaatcgcctggatcatgcgcggatccgtattaggtccatagccctgaggcatggggccaacctgaggggccatattgaaacgctcctcgagctcagacgcaaaagacgagactgaggatcgtcgagacatctggctttgacttcctctcctcattctggcctgggatgaaccggttcttgaagagcttgcccgcgcagcgtgttcgcttggcgtaagtgggcgctgggagttcatgcggtaggcagaggcaggtgccaaaggaggccccatgacagacgtaggggatggcggagccacgtcgatggacttcttctcggctgctgtgatagcttcccggtgatcgaagggtagtggaggatggctggcaccagatgtctgactggctgaactgtggggccggcggtaacttggcgttgttggtttcgcagcctgaatttgcgaaaggcgaggtcgcgtcggagccttgggtggtacatgtggagttgtgatacttgcagtgactgaggcaatctcccgtgagctgtccgtcacctgactgtcggaagacagcgggcgtgcggacacgcgatccatcaggatttgatctatctgtttagaggacaggatagtctgggatccttggtccatgctcactgaactaggttgctgtctaacagagcgaggtagggcgttgccagagatatcgttcaaggccagtccagcaccagcgagctgatcactattagctgtgctagggcggctacgagtagcgccaacaggctgctctccggggaccatgatagcggccccagcctttgactctgtcggctctgtttgagtagataaatctgccaccgcagggatgacaaatggcatagacttcgctggatgagtttccacagagcgcacggaggagaatgagaattccggcgtagggacaaggcggggctttggaacaataggcttcgtatatgctggatcgaggcaagagatcgtcaagttcggtacttcgcgctcacgttcaacgtgtttgataacatcgacgtattgaatgacaggtggctcgggttcaggaacagttgcttcgactggcgtagtagattgagtggtgatcgaagagaaagtcaattcgggcacctcacgctcacgctcgacgtgcttgataacatcaacgtattcaattacaggctctgctttggcgatagttgcctgcacaggggcagtggactggttgttgatggaagagaacgtcaactcaggcacttcgcgctcgcgctcaacgtgctttataacgtcgacgtattcgataatcggctccgccttggcaagtgttgcgtgtacaggcgcagtggactgagtggtgatagaagagaagcttgcctctggcacttcgcgctcacgttcaacgtgcttaatgacatcaacgtattgaatgactggcggctgcggttcgggaacagttgcttggactggctcggtggtttgagcagtgatagaggagaaggtcaattcaggcacctcaggctcacgttcgacgtacgtgacgataggctccggcacagcaagagttgcctggacagggacagtcgtttgattattaatggaagagaagcccaactcggggatctcgcgctcgcgctcgacgtgcttgattacgtcgacgtattttatgacgggttcaggctcaggaacagttgcctggattgcctggacaggtatcgttgactcagcggcgacagaagagaagctcaactctggtacttcacgctcgcgttcaacgtgcttgatcacatcaacgtacttgacaacaggctccggcacagcaagagttgcctgaacagggacagtggaatgattattaatggaagataatgtcaactcggggatctcgcgctcgcgctcgacgtatttgatgacgggttctggttccgcaacggttgcttggataggtactgtcgactgagcggcgacagacgacaagctcaattctggaacttcacgctcgcgttcaacctctttaattacatcgacgtacttgatgataggctctggcacagcaactgttgcttggacaggggaggttgattgagtggtgatggaggagaatgtcagctcgggcacctccggctcgcgttccacgtatttgataacctcgacatgcttgatgattggctcaggcacgagaaccgttggttgaatgggatgagatgtttgtgatgaaattgaagatatcgtcatctccgacacttccggtgcgggcaggacatgcttcaccggtgcggtggtgcccccggtgatgtatgcgacactcagatcaggccgtttaggtgcggaaggcgtggtctcttgggaagaaacgtgcgctatgcccatttcgggtagatcgggttgagcgttgacatcgtcctgctggtcttgaaccgaacgatcgcccacaagcatgttttgcggggtagaaacattcgatgggtcatcggatgagggcttgagtggagtcgcctttgtttcctcgccgatctcccggtctgtttgagttgcgtcgggtgcaagagcatgcggcagagcagctcctgcagcaataccgacagctccagcaacaatgctagtactgatagacgtgggctcccaaggttcagtcataacaccagaatccaccattgcgggcttaggtagtgcatccagcattgcatctgagggtctgcgtgagcccgatgcaggctccatgcggggtgtcgaagcctgggagtttacttcgtcatcatcaatgtcctcgagctctccaagttcggcaaagaggctctggccctcttgagctaatggcagtggcgcaaagctgggtgctgcggattcgcgtgaactcgaaggtcgactggttgatgcgaatgtggcctctccagatggacgaatacgtctcacgctacgtttagacttaacacggggtctggaggcattcctctggctcggagagtcgaacactttatcatactcttcctcatcggaagatgcggaagcagtgctgttatatgagttgcggttgcgagctttggccaggagcaggggagaaggcactcggcggcgaggagtggtctgtacgttttctgtctcggtaagatctgccgaatcgctgctgtcatccgccatgctttcgacaccagtctggaatgcttcgctctcagttgcggttgccacctcattcgctgtttcaaatccatcttccgcctcggtggctgtatggtagacgtcgctaggttcatcaggagactgcgagcgagagcggcccctagtggataacgccttggtgtgggtctcggtaggactgatttggcccgcattgtcttcccaatcggtgtcattaagctcaacaactgatttctctttgcggcctgcgcccaaaagatctgggcggggaggctttcgggacggctccgtcttcgtcttctggcgtttgctggttgcgtttaccgtagtgctctcacggcggcgttgctcaacttcatcccgagcctcttgcagcatgcgcttgagctcaatcttttcggtcttctcgcgatgaattgtgctcttaagactctggatcatgcgatgagcatggccgagcgagctcttcaatgtttccgattcaagatggccatggcgaggggtgaacttgttgggggacggtggcggagagctttcaggtgtgatctgctcgggctcattgtcctcgtcgtcatatgcaatatccctcgagttctggttttcatagtctcggagcctcatggcaacggccttggcgagttcttgattttgagaagtcatttctaagagcttcttttggagcgcggccttttccgcatcgccagaagtcaggttcctccgcaagaggtggatttccgcatcatttgccttctgcgtgaggatttgatcctcaagcagcctcgcattggtctgccttagctcctccagctctcgttccgcggcgttcttttccgaattcgacaatgtgatggtagtgttgagccgttgttcacgttccgcggcctcccttgcagctgccataaactcatgtgcttgagtctccagcgcccagttctcgtccttgtagcgttgctcactgtcgtcgagcgcccggatcctttgttcataaccctctgcctccaactcaagtctggacttttccaaattgacaaacttgagtgtctcatctcgttctgcgagaagagcttgcagttggcggacctgggccaaaagtgaagtggagatctcagtcgcaaattcgatatcgtggacacggttcgacggttgattgcgctgcttgcgggatggaacgctgactttgctaggggagtttgtggcttgactggcgaacaaagcggaatttaagggtgactatcagaactcgatgttagttcggttagagttagatgtaaacccaggcagtaccttttgatcgaaagatagcgttccaagttgagcatcctccgggcctccggcaagacgtttgggtcctaaaaacgctcgtgctgactccaagccgatctcattgtactccttttccaaatctgccagtttgcgtcgcagttccgggcccatctctccctcattctgctcctgctcaacctccttcaactgctccgagagctgccgttgctgatcgataagggccgttcctagccttgaggcctcctccagacggcgctccgtctccgccaagtgggcctcgagggcccgtttagcttgtgctggtgaagacgcattcaggctgtataactgactgtcaaagggcgagtatcgattggagtcgcgacgagcagttggccttccggaattcgcaacgaaggggtcgtccatggacgcaaatggcccgatggcctcagcgttggatgtggtcattatgtgggaatcaggggcctcgaacggcatctgaatcctcttaatgccgaggacacagttgccgttgagatatcagggactcgcggcttgatcgttgttatgattctaggccgcgggcattatccgaatcgccgcactctgtcaaagttgtcgcaagacgctttccgtggaggtctctgccgagccgaccagcgaccaaaggttgttcagggattcgggattaacacgctgatgttgatgcgatagtcgtcaaacggtacgctgttgaaagatgtggaagggaagaggggggaagcccacacgattaaaaataacaaacaccgaccttcggacgaatcagtgagctcccagtgagattggccagatacacgcgcgcagagatgcaactaaccacaacaaagtgctcgggatctgcaggacctttggaatgggccccggtctgaataaacgaaagactaagagacaaagggaaaacagaaggatagctacctaaaaaatgaagggaaaagaaggaaagggagcgtagggagtgatttgacaggtcgagtttggatgactcggcgggggagaaaagggaagagagtacggagtagagtgaacgtggtattgttatttgccaattattggcgccggcgtttgagattcacgatcgatgatcaccccatacggagagatcaatctacgatactaggctatcttgttttccctgaagggacctttggaatttactatgaaactgtaaaaacatatgaaacgctgattcgacaggttcctgcgtgtgtttggctgccattttgctatcaaacgcgtcccaaagtaaggggggtgtttgtcttgtttgcatcggtgtgcttagtcatttcatcgcctcgactttggaaatgcgccgcatctttacaacctttgcatctgacacgattgcttgatatactcgactgaccttcaccaatatacaacacacgatgggcgaagagacagaagtcgcagacgctgtcccccaagtcgctttcaagaaacgctccaagggcaaagccaactttcgcaagaagcccgccacgccacctccagcttccgactccgattccgactttatatcatcagatgacgaagaagggcggcgaatcaagaggcgacgcaagaatgcagctgtcaccgcatcatcgacaaatgcgacaaggaaacagcacacagacggacctacagcagcggttccggctccattaacctcgagcaacgatgccaccaaagcttccgactggtacgatgagaacttgagcgagaagaacctattgggcacaacccgggcaaaaccagccccctctacctcacagctagacggaagctacaagggcgccgccaactatcaatctttcatccagaagaaccccgatgcaccggggaaattcggtcctgtcaaagctgcgaccaatgttaggactattacagtcacggattatgcccccgatgtgtgcaaggattggaaacaaactggctacgtgagtcaccctcgcctgtatctatatgaatcgagactaaccatttgaattcagtgtggctttggagacagttgtaaatatctccattctcgcgaggcatacaaggcaggatgggaactggatcgagactgggaagtcaacaccaagggcaagcaattaaccgggcgagtgatttcccagcgaaaaggtgcgggcaaaatcgacgcagaagatgatgaagatgatgaggatgaattgctagagagcatcccattcgcctgcctcatctgcgtgaagccttatcaagaacctatcatcaccaaatgtgggcactacttctgtgaagcctgtgccctacagcggtaccggaagactccctcgtgtgctgcgtgcggcgaggggactggaggtgtctttaacgttgcaaaaaagttgaatactctgctgaacaaaaagcgagaacgtgcgcgcaggattcgagaagaggcgattgcaaagggggaggaggtcagcgatgaagagggtgatgatagtgattagtctctgtatagcataatattaacacaaaagcagctggactgccaccttctcattgcatattctattacaacgcaactggaaaaccagttgatcgtaataatgcgtcgtaacatctctccgtccatgcatatcatttctggggctaatgtggcaaaagtggaggtcaaggtatatagtgtatgttgtaccatgtacagtactgtgtgccaaggcttcaccattcatcatagagacagtacgacaatacgctggtcaacgtaatcaaggaataatgccgaccacgcggcatgcgacgcaaccctaacgcggacatattccgtagttccacggcaataaaaccgcgggccttttgaatggctcacgttccccgctaagttgagacttgccagtgccaagtgcagtctagttatggtgcgatacaatactccgtacatacaatcacttgcattccatcagatgcccctcgggatattccttcccattttacatgatctcactacattgcggagtatccatctctgatctcagaggtcttacaagccatattgcaatccacttgatcaagatgtgggccgtcacagccacagaaataagaacccgcatattagggccctgaatctttcagggtccattaatatatgacggtattattcaagattaatattattcgactatattcgactaattcgactatgcttccatgttccccaagtaggctgtgcatcgacaaaaaggatcaatggagccgaccactaaaggttattctggccaatttaaaatcgactgcaaccgagccccactgtcttagtctgtaagtaataatagtctgggcgccttagttccttagtatacggtctatgcccaaactggaaaaagcctgctaaatcgtcgacgccacgtgctcttccggacagaaaaacgcgttatcagggtggatgcagagggtgcaataataccgagaatggaaatgtgtacggagattcgtaagatcaactgttaagcctttcgttccgtccatggctcaagcgtaaactcgtcaaaaaggggttaagcgtaggtccaagccaagctttttggtttctccccaaacgaccaaaaaccgaaaccaaaaacccaaacgccccttggcatcagactaaaggcggctcaggggagtcaaacgccccccggtggccaatgatatggccatgacatctaaacggggtaagtccaaggagaagctcccctcttcggttctatttgactttaaatcttttcctttttgtacggggtaatctttcgtttccatttcatctgccttgactagtccccttctctttcctttattattccgcgccttcattttggatcatttttgccttcaggggtggtatttcggaataatcactccttctactccttctactccttctactcctatttcgcatcattatcatacatcgggtacatatcaatggcttagtagtgaatcctctacctcaagtcacacttactacctctccacagagggacttttaatatcttcattcattatgaaaggcggattccgtatcgcggggttttgcgttacctgcctcattctattctcaatatatctactcgaagcgcatctacaagacatctgcaatcaatatcgcgctggcgcatatgtgattcgttggctagatcgccatggcactgccccaagcccacatggcgagatcacaccgggtgataaagtgattgtgatggccaagctggaagaagagaacaccgattgggtgaaagacgagcttcctgagtgagtgcttcgatttcgcacttcgaagacccaactaattggcttgctttccaaacagctggcaacgggcaatctacactgtcaacccctcacacgagacacggctaaatcctgatgttctgacaactccattcaacaaaggccatgaagccatggcctacttcacgtacataatcgactcctaccacaatctcccctcgaccatcgcctttctccacgctcatcgcgcaggcttcctcatggcatggcacgtcgatgcgccactccacgataacgtcatagccatgcgcagtctccggtccgatttcgtccagcaaaacggctatgtcaaccttcgctgcaattggaatcccggctgcagggacgcccatcgcttcaatagtcatgtcaccgaccaggtctggttggatgtcttcgacggcacgagtacgccgcccttgaatacttcctcgtccacgcagcaggagttcgccggccagatgtatcttcgcaagccggccaagatcggtgccgcatgctgcgcgcaattcgctgtctcgcgaaatcaggttcagaggcgtccgattgaggattatatcaagttccggcaatggattatcgacacggagcttactgacgcttcgtcggggcgggttatggagttcttgtggcatataattttcggcatgcaaggggtatagtaagttatggctggtcacattttgttataatgttgaactaacgtcttttgcagttgtcccgatgaagaattatgttattgtcaagtctacggacagtgttgattccggtcttggcttgagcattgacacctcccggaatgggatctacatatcgtggaccacgtggcgttgcacgtggcattaccttctccctaccacatcccttttacgacagtacaaacacccgctcacttgaattcggccatacatcttgtcgcatagaacttggagttttcagaagtgcttttcttatatattaattgcgttcaagcgtggaggataaggttccttatgcacatactctatcacttttaatgatggacttgaaaatcagagtacataaaatatatattcttaccattgtcttcttcatttccttgcatacatctcatccatccagactttatggcctttactaccaaagtgacttcatgctctaatatctctgcaaataacaagacactaattaccagagacagtccgaatacactgctttagatatccacccaccctctgcacgtcatcaagacaagcaacaacaccaacataaccatcaggtctaaccaccaccaatgcaccgtgtgccggatccacaccatagatactatacgcattatccaaagccgacccatcatagaaacgcatctcagcctgctgctttacacacgccggcacatccttccactcaaaagaccgatgcagccggggatgcaaaataatcagctcaacagtcgatttcggaaactgcgcttcaagcagagcgacttcttccaatgtctgtacagaaacacttctccgatcaagaaggtccgttgatgtaagacatagaatgcggaatcggccagtagaggggatatctgcggtgttatctgttagatatcatataatatcaaattccgaccacaaactccgagtcccagcgcattggcataccatcatggatatcccgctgccacccatcagcatgccgcagcaatcggacattaagcaatctccggcccggtctcaggatgccggatatgtattccgttccttggatggggtttgaacgcctgccctcaacaccattgtctagctcgtctcggataactagcatattctccgggtattccacgccacacccactcgtaaagccatttccgagcttgaaagcctgttggaattcttcttgtgtcagtccttcggttgcgcccatttgccctgagaacatggtggagaacttccggtcgaagtcgatgagctgttgggctatttcgtgccgttctgtctggtatgtctcgagtaacggggttgggctgggaccgcttggttctggtgcaagcccgttaatgtggtatataagcttccaggctaggttgtaggagtccatcattgagacgttcatgccttggccagcctggtggatggaagttagtgattttgatgtgctcgaggaagagttgctgggagacttactttcggactatgtgtatggcaggctatacatgtgcttctgttagttcgatgctatgcactctcttcggggcaaacttaccgtctccaacaatgaaaacccgtgcaacccccttcgaatcattgacgataaactcgggcgagacacgctggccaatttgatacgcagcccaccagtcgacagcatcctccttagcacagagagagtacggcttgatcgcatcagcagcttgtttcagaatcccctcgagggtaatcttacttctccgctgtcgagcatccccagacttaccatcctctcctccatccagcatctgatccccctcttccacaacccccggaacctgaacatacaacctcgtgagatattcaccggtcgaaattctctctctaggaataaccataacagaaccagctggagaatgaatcgcacaccgacggcgaatatccgggaaatccgtctcaacaaccacatcaaccacaccccagatatgatccaacgactccccctccagcgacagccccatacaccgccgcacaaccgaatgcgccccatccgcaccaacaacatgcttcgcgcgcaccgtcttcccaacccgaacaccatttacgatcgtcaccatactaacccgcacagggaactccgcgtccccatcctcatcaatcccaacatccacaacctccgtattccttaaaatcccacgctcagaatacctcatcaaatccgtttccatgatacgctcgacacgtccctggtggatggtagcctcgtagcggaaccgcgctggcgggataatctccggcacgacggatgtgcgctcgatcactttctctggatcggatgacgggttccagaatgcgaattgccacatttggcacgcttcgttctcgatttcggtggagagaccgagggttttgaggacttctagtgtgcgtggctgtaggccgtctgcttggccggttttttgagtgcttggttttgtgtctatgctgaggagggaggtggaggttaggccgtagcgggagaggaggagtgttagcattaggcctgctggtccggcctgtgtttctatattagggatttgtttttgtttggatgctggatgttggatgctgtgttggtatctggggtattgtattggagagcacatacgccaaccacgactacttcatatttctcttcgtctttatcatcgcgcttgaatgggggtgctagtcggggtagtggtggtgcaaatgatggtaggactctcaagtcccgagatgaggaggaatgctcagtaaagaccggcattgctttttgggtgctagaagcagatcgttcgagaatctttagttattggaagggagaaaatggatagttatactcataaatcgggtttgatttagttggcctgttttgcctgttcttatggggtagccccgcgattctcttcgagtgggggatctttatatccgcgatttgcgcaacaactactccatacgcttgttttgattggatcaagctggcagatagtttattttgagaattcgtcggtaggagagggtggcagtttggatatatgtacagcagtagccatttggttacataggtataccattcggaatatctcatacgtccgcgaataagagcatataaacggcctttctttcgtgggaccatgtatgtgtctagtgagatgctcttttttggagaatgtcttgttgcatgtatggcatctttggtcatttaacgaagacctggatataacgaatatttactcgtgtctcaattgattcattttaaataagttttactgtagtatgtactccgtaggtgttgatcatcaagtccggaattcccccatttccccacagtacgtaccccacatccatttcgtgcatcaaatctatggttcttggtgaaaggctatgctttcattagttaattactagaagtattttgcagcaccttggataaaaatattgatctttcgaaatagctctggccataagtaaacaggaagtaagatcataactcattaatcgcgcccaaatcgcagcaaccctggatcccaccaagatgatcctaagcaaattggatcagtgtttaaagcttttgctcaaaatactgctcaactcgctctacaagatctgctttcttccctgctgtggcacgcccatgcgaatgcaagaactccttcagcacgaccatcgtaagctgaacgaggtattagtttggtcaattacccgagaggattcgaatgctcaccttggaaacagtgcctttgtcaaagcacttttttacttcatcttccactccaggggcgctgtcttcaatcttaactcgctttggtgggtggtcgctagcaggctcggtcttcgcacctcgctttaccagcgtggaggtggctgctgagccgtcaaacatctcggaggcctgcaagttaagttcctccgcccatttaagaatatagtcgccagcgcgctgtggtgaagcatacattcggtcagtgcatttccgcaatttctaagagcatggaagcagcaaccttatgaacctgtcggtacttgggcacagtcttatcatctggtgattctgggaaatcttcgtccaaggcgatagcctgtaagatacgatagtgccattgaagcgctgcaacttggtcagatcatttccaacaaatcacagtaatgaggctcacaagggttcggatattttgaagggtcgtatatagccttgggaagctgcaattggcgaataacatcccgcatggcattattcaatgcgtcccctgctcggttaatcttactatctggattttggcgcacatcatctgcgaaaggaagcgcgataatccacatcccaggtggaattttctgcacgccattctcgtcgatcttttcagctccagcaatcatagcagctaagaccggtgaggcatttctgcgggggataaaccaaaccaaagccagtttctcggaatcgagaagtttctggtgcaatgcagaaaagacccgtgtggagccaatgtaaccctcttcggagggatagataaatgaggggtgtttgacattggcccagaacggcagggctgacaagggcttgaacccaataatacggatcacagggtcaccgaagttccttagcgcctgttgttcttcaatgctgaatgaaacctgctcaccgccgaacttgtatgcctttcgaatgctagacttatcgatctcctgtccggtctcgtcggacattagagttgtgacaccttgagcaatctgagcagtctcgcccccttgccatatgaagcaactcctggcaggctcttgctttttgagcagcaaatatccattgacggatatcttgaaatcaggtccgatctcaagtggcacatttgagaacagcgatcggcggggtacggatctcgagttgatgctagacaatagagaattaagcaatgtgagtccgtcacctttaccagtcgatgcgttggtgtccggctgtaggtatgccggggcatcaccatcactgggcgatgttttgtagatgatgtcctgctgattgtgagtataccgctatacaattaggctaataacctacatcgtagaatttagaggtgtcgaattcgtgatctgattgagagatgggaaacaactcgatattgacaccaagatcgtacaagtcccttgcgcgaactgttgcggcggaccgcattgccttattgtctgcgtggggattatcgttgtcagtcacgacaaacagtcgtcgagatgagaagtttggagccttcgaggtaaagatctggtttgcgcagaacagcatattggccattgaaactggctccttcgatggttccaagatctgccgtacgtcatcgtcaccatctgctggagatgtgagggaccgtaagtgcttgacttcctgggctgatggaacatcaagatccgtgtacagataacagtggggatatgacagatcttcttggtcgtcctcattttcatcatagaacttggataatttcgttccgtagagcagaacgccaatcatatcatgagggttggagacgatgcgctgttgcatcagatggtatgcacacttcaaggctgcagacgcgggtgattcgtcgccatgtttcttaggatcaggtgatggacgaggcgtgagcatcgagctgctgatgtctatggcaaacagcaccgcatctttgactgatttgaagctctatgtaggcaacagtcaacatcggtaactatatctccggcttttgatactcacggtctggtcgagctcttcgtcctcgtaattatcctcctcgcgcgtgtagtaatcttcagccatggttgttacaaatatgagcttgacagattggaaagatcaaaaggtgtaaattaatcaaatctaaaatatcatcgagacgcgctctctgacgcggacaacacgaaagtcaggtgacgctgatgcctgaagctgctgacattctccgacggtgattggccacggccggtgggcggcgaaagctacataaccaaaaccggattcaacaaatccgaggtccaacataagctggaattgtcaattcctcctcaattaataccttcagactactttcttttgtctattccaaaatataattcatccccccaaaaccatggcattccgcagccttttcgcgatcccccgacagttattgactgagaccacatctctcggaggtcggtcggcatttagcagtcagctcagatgcaatcaacgaggtctcgcaacggtggtaccgccagtcacacaaaatgcgacaggttccaagggcccgacagctattgtttttatgaacatgggtggaccttctacaacggacgaggtggaggactttttgagcagactatttgtacgagtcataaatggctacattggccacgttgaattgatatgctaacacatgaactacaggctgacggtgatttgattcccctgggacgactccaatcgtatatcggccccctcatcgcacgtcggagaacctcgaagattcaaaagcagtacgcaagtatcggcggcggatcgcccattcggaaatggtccgagtatcaatgcgcagaaatgtgcaagttattggataagatctccccggagaccgcgccgcataaaccttatgtcgccttccgctacgctgccccattgaccgagaccatgtataagcagcttttcgccgatgggtttggcaatggcaagggaggacgtgctgtcgcgtttacacagtacccgcagtactcctgctcaacgaccggcagttcccttaacgagctgtggaagtggcgtaatcgtctcgagggaaagcgccctaatggagggtccgagccagctggcgcaatccagtggagtgtcattgaccgttggccttctcactctggtcttgtggaggcgttcgcacaaaatatcgaggctcaactcaagacatacccagaggagaagcgagaccaggtcgtgttgctgttctcggcccacagcttgcctatgagcgttgtcaaccgaggtaggctatgtccccgattactctctagaattacactaattattctctcacacaggtgatacctacccggccgaagttgcagcgacagttcatgccgttatgcaacgactcaagttcaagaacccataccgcctgtgctggcaatcacaggtcggacctagtgcgtggctcggggctcagacagctgataccgttcaagagtatgtgaaacgaggacagacggacttgatcctgattcccattgcgtttacaagcgaccacatcgagacactgtttgagctggatcaggaagtcatccatgatgccaacaacccgggtgtcaagcgcgcggagagcttgaatggaaacccggttttcatccaggcacttgccgatattgcccgcgaccacttgcaaaagggagaattgtgttctacccagatgacactgcgttgccagggctgcaccagcgagcggtgcttgggtcagaagaaattctttgccggccaggaacatgcttctatggtggtctaaccttggaagcaactaagcttacatgagtttttgtttggactagggaagtccaaccttgtatgtatacggactacgaggcgttggaggcgttgtaagagtataaaatttcggggataatgtactgtacgatatatattttcaattcttgcagggcatcttacgatatacaaaggccgtcagaatgacaccttaatatgactacatgtgcaagcccaattgcggagattccggagctaagagctgccaatgatgaaatcccgataagaattcaaggaatccaactaacattcccccctctttcgtatgagggtgatgatgtgtcgtgtctctaaatcttacaaatcaatttgttagcggtaatcttacaaagttggaatcctgcgaaatcccgaaatcaccgccaatgtcccaacttcatcatggagaacgaagaactctttgtgggggatcccgatattgcggagctgcacacagctcgagagactcgtccgattgaacatgtaaccgaaaacacgcctctaattgatgaagccgatgggctgcatcgacggtcttttgaccttacgaataatcggccgaaagggaggagagcgagtgtgagtgactgatttacgaccaaagcgtcggaaacaactgtctaatctgcaaacatgacagatttggtggctgctcccatttggtgtcctttttaccctgggttttggtggaatggctgtgcccaagatcaatttggtcatgtcgctcatctgccgagattatctcgccgagaagaccacccaagaccccggattcacctatctccctgttatatttggggataataatccacagtgccagataccgcaagttcagtcgttggttgctcagttccagctctatctcaatcttattgcgggtattctatcagccttagtgagtccccggttcgggcacttatccgatcgctacgggagaaccaaaatgatcgcgctgggcgcgatgggcgcggtactcaatgaggttatcactgtcattgtggctaaatggccagagcgggtctcggtcaatatgcttctagttggagcagtcatggatggactgggtggatcatttacaaccgcacaggctttgatccattcctatgcctctgactgcacgcccactgaaaaacgaagcgtggcattcggtctcttccacggtgctttgttctttggaattgcagctggaccaggcggtgccgcatttttgatcaagcatggaggcacgctacccgtcttctacattgcgcttgcattccatgcaactttctgtctatcggtcttcttcatcgtgcctgaatctttgtccaaggaacgacagctcgcggcccgcgagaagcatcgcttgaaaattgtggatactgactctcctaaatggtactcttggcgtgtctggaacccagtgaacttgttcactccgctttcaattctgatgcccgccgttggaaagccgagtgccttgttccccaaccgccgcggtgccagtccggctctacgccggaatatcattctgctggctgctatcgatactgctgtctttggagtcgccctgggcacggtacaggttatcatcatctacgccgaatacatgttcaactggggcagcgtggagtccagtctgtttgtagcgaccgttaatgtggtgcgagtgatcaatcttttcctggtgcttccgcttatatccatgttcttccgcaccccgtgcgtggaagacggaaacattcgcggctcggacatgctggacattgttctaatccgcacatctataatattcgatattttgggctacattggctatgctctgtccaagacaccatcaatcatggtgatttctggtgtcgtcgcctcgctaggtggcatgggttctgcaattctgcagtcatctctgaccaagcatgtgccgcatgaacgcattggacagatgctcggcgccactggtcttttgcatgctcttgctcgagttgttgcacctactgtatttaacttaatctatagtctgacggttgcaacattacctcaggtagtgtttgtggcccttgcggctgtttttggtgtagcattcctcatgagtctgctaatcaggtcgcatggtatgtttattctcccgatctcctacaagaagtatactaattactgtgacagttaccctggaggctggtccccctactgatctaagattggaagaagatgccgacgagcatgacgggcttttgcggtaatggatggttctttctttgatacaataagctgtgcttccttctaaatgttatatgtctgcttcgtagcgtcttttttgatgttctatatgattgattgaaatagaccggtctttcttattctactttgcaactctcatggatacatgactatgtaactagctgttggttatttcgtaatgaagatgctcgatgcatgctcggcagactagagccattggagaaacacacatatatcgatagacctggagtaggcatagaatatgcagcccaactttctttatcatatatccctttcctcctgatttttatatcttataggtcgacgtgaagtcatggaagttgtatgcggttagatccatgggtcgtatgacaggccggcctccggtctccggcaaccggcactggcctaacgcgcaagttgatttgcatcgggaaaaaagatgttactccgaccttaccctacgctctccgcttcaattgcctgtacacctaattttggaccatagctggtggttgaaactatttaaatctcctttgtttcagtcctctgctcgtttcggaacatcggtgcaaggccgctcatgtacgactggtgaacccgcgcgcaacccgcgctcaacatctgcaatatgcttgcccgcgccgcaaaaggcggctcgataataccttctcccaatgccctccgggtactccgccaattggctctggccggctcaacagttggcggattctgcaccgtcgcagccctcacgtacgaagcccatcgccgggtccgcatggccgagaaaatcatcgagaataaacgaacactacacagcagtgcgccgaattacgatgcaacatctgccgccaaacgactaaaggtgatggtcgaggcagcagaggcgggcgaattcatgggcattgaatccctcaaggcgaggaatcggaacgtacctgatgagccagggttcgagacagaagaccttgagcccaagcccaagcccaagcccctggtcagcttggaaaaacaccatgctcgctcaaaacgttcgctctttgggagccagtcaattgcacaatccaattacacaggaaacatcgattctccgggtttagcccagaacgctgaaattctggctcgggagaaacaacagggcgaacttgcacgagaatctggcaagctgccctttgacgccgaaattcgcaggttgttaactgaggagcgggaaatcactgctgcgaatttgttcttagcgcacactcggcagacacctaacatctcttgggaacgcagagagcttgcatgtgttatattcaccgccaactgcatcaaaggaaacctattcgttgctcgaactttattcaatcgcctggacaaagtcagtgtcgtctcggcggagatgtgggctacactgatgcatctccttgcgaaagaggggcatattgactctgtcggcgttatatatgataaattcaaaactagctttgctgttccaaaccatctgttggaggtcatcctgcgatgtctgatcgagtccaaacggttggactcggccaagttcctcttcttccagcgcttcgaggatgaccgtgactgtggcctgtgtggtgcttatcttgatggattatggcggaagaccaggagcatggaattgctgtcttcccaactcggcctcattctcaaacgcctcgaatcactcgatcgaagaccaaccgagaaacttttcaacccaatggtcaaggccatggttgaaactggccgagctgaagaagctgaagctatggtcaaggctatgccaacacactacgggactgagcctggatgccggaccattggcttgattatctacaacagagcacttaactgtgaatgggacagggtcatggatggcatgcatgctatgcacgagcatggatacacccaatcaaagaaggatttcactatgattttcgaccgtgtcttcttggaatactaccccacccacacgggccagcaaattctcgacttcgtcatctcttgtatcaacgattttgacatacaacccgacaaggtactccaccgacacattctcgaagcgatcattgaaaagggcaacgaagatatgatcgcactcattatggaaatggccgaggaacagaattggaatactggtattgacgaacggtttatcaagtcactcctgaagagccgaaaactcgcaatgaccgacaaccctgtgggcatctggcgactgaagcaagccgccaagaatcgacaagattatttaacttcttccaggcgcatccttgggactagttctgacacttgggccgtacggggtgagaaaattgccccgattcacattcccgccgaggaaactttccctcaaacggtcagcgagatggtggcatccaaaaatgctagtctatatgttccgctccacaaacggatggagcactttatcaacatgggcagacacaccgatgccctggccatttaccatcacgcatccactggcggtttcgtagtcaggccacttcatctgaagctggctgtgatcgccgcgattctcagttgcaaaaagacaggcttggcgaacgcgcgacgtctaattacatctgaatgggattactggaagaatatgccttctctccggcatagtaagcgttttacttcgtggattcccatcttcttccaacgggtcatggaggtagacccagaagccattgggtatggaggcttgatcaaaatggccatttttgaatattacgatgtttgtgccaacaccaagggtcttttggtgaagcacttttgtgctacgtcttccagccgttacctcattgggggtggaacgccagaccttgccgtcgatctcctcacaacaatctatcaatctcggtggcggatctctcatggcttcgaccaggtactattgaagatgttgctgcgtgggtttgccaaggtccataactttaagggggtctggtggtgcataatgacagtcctctcgcggaatgagcctctcaatcaagactttgtcgtggaagccacctctcagctgggccccctagaaagtgcgatcagatccgatggctcctacgatgctgcggggcaagttttggtactccggcagatcgtgggggcactggaggccaaacttgaaggtgattcgcattggtcaaccattaatgttcacccggagttgaaaaggttgaagcgttccaagccattcaaactcactgagcaacaacatctcctgcccaccacagacctaggggagctcatcatgaactttgacgaagagtgggagttggatctgttgcttaagcgcaagcagttcgacgctcctgatcatgcaaagtggtgggctgagtccaacgtcacaaactcgaataccgtgccttcagaagatcccgagtacccgtggaacaatccagcgcattggggtgcgcattacgtgccggagaagtactcgtccgactatcacctggagttttcacttggaggggaatacgatgagtatatggagtatgaagattatcaggggcaccgggcgtcccaatgaacatgtataatagtgtaaatagtatatgtacaatagccatcctcaatagattcataaatatatgcctgtataccgtcgtatatccaaatcagtccactcggagcgattactaccgtggtgtctccttctgcgtagaattggaaaggcggagagaggtcatccagtgaggctttcacatgtcacgccaccacccacccctttctcaaacatcagcccataaacacaggccaatcgactttcctttaaatcaattgcctaggccgataatggtcctgcctcagtcgactccgttctgacattatctactcttccaaacccaaaatggcatccgtgctcaaagacgacgcttccctctccacggccgctcaacgccgcatcgacaaccacgaagctgatgttgtaatcgtcggcgctggagtcctgggctgtgcgcttgctgtcgcactgggaaaacaagggcgcagtgtgatcctgctggaaaaatcgttggaggagcccaaccgcattgtcggtgaactactccagccgggaggtgttcaggcgctcgagcaactagggctacgggattgtctggacgatattgatggcattgatgtgaaaggatactgggtttcatactttggcgagccggtgctcctcgaataccccaagtctagcccaacctcgcctacaccgttaggacgagctttccatcatggtcggttcgtgatgaaactacgggcagccgctttgtcttgtcccaatgtcacagtggttgaaaccaaggtgactggcctcatcatatcgccagataccgaggaagtccgtggagttgagtgtatgaccaaggatgtcaaagatagctacctcggccaactcacggtggccgccgacggctacaactcggatttccgcaagcaacaccaccaatacacacccacgcggcgatcaaagttctatggcttggagctcattgatgcgaaactccccgcgcctaacactggtcatgtcctcctcagcgataacccacccgtgctcatgtaccagatcggcactcacgagacccgaatccttatcgatatccccgataactttcctctggcctcgctgcagaacggtggtgtcaagggctacatgcgaaacaacatcctgcctcagctcccagagggtgcccagaagccgttctccgacgcgctagagcagggccagttacggtcaatgccgaactccttcctgcctgccgcggtaaacaagacacccggcttgatgattctgggagatgcgctcaacatgcggcaccctctcacgggtggaggcatgacggtggcgctcaacgatgtctgtctcatccgcgaattgctcagcccagagcgcgcgcccgacctctccaatacaggccttgtcctcgaacagctcgcggaattccactggagacgaaagtcttcttcttcagtcatcaatatcctcgcgcaggctctctatgcgctcttcgctgcagacagtatgtattctgactctttggttaattccagtaactaattgtttctatagatcaatacctccgagctcttcagcgtggctgtttccgctacttccaggttggaccagtaggcggccccgttgggctgttggccggtctgatcaagaaacctctggtccttgtcagccacttcttctccgtcgccttcctctccatctgggttctcctctgtgatacccctccgctcaagctaatcctagccccctactacgccttcatgatattgtacacagcctctgtcgtgattttcccatacatctggaccgagatctggtactgatctggcttggattcatcaattggtgttctactttcctcaaaagcgacaatgggggtactatcgtaacctgtggaatatatcgtcgatattacccgccaagtctttgtttaatatcccatcttcaccctgtgtcttttcttccacgccttatgtcatttaatcttgtccagcattttcccactgcatctgatacattgcaggatttgtgttacagatttactgtactatatactatatgtcataccattatttcaatgatagatgatacgatgtcaatatatccggaacattccaataatcaacgctttctatgctacataaacatacaaagaaaagaaccccaaccgattcacaagattcacaccctccatagcccacctcccttacttccgatgcccatacaccaggaaacaccaaacccaaacctaaccctcacaacaacttcacacaaagcgaatatgccaaaaccccaaaacaaaacgaaaacgaaaacgcaaagaagttaggtgcaacaggcacaggggtctggtccacacgcccaaaccaaggcagcgcaccaacgccaggcagctggagacccgaccaattccaatcccaggaaagaaaagacatgacggcactggctgagcggatggcgcaattatgtacgaaggagatgctggaatacacctcgcagattaggctgtaggcgagaaaaaagcaatagtataaatacagcattaaggaaatgaatatcatccacatctttttgttttcttttactttttctttttcctttctcttttttaggtgggattgctgttgggttgggatgtgtcctttaggtatgtatgtgtgtatgcaagcggattcttggtgtttgtggtttatcgtggattgtagagcggatgggttgctctgcacggtgttgttcttgtgggtccaggtaggagagaacgaggatgagcacgacgaagggaagagagagagagaggatctgagaattgaatctaagaggctagactttccatttcctccctttgttctctaggtctttgttattcgcagcccggtctcccatttacagacactgttgactgacagcaagccagaaggacaagaaaaagagttagaaatcggaagagaagacaatgcaatccaggaagtatcaaatacatgacctgagcaggaaaaagaagactttttcgaaaattttggtttgtttctcattggcaacaagttaatatctttctcttttgtacaaaaccaggaccgaaaaagaaaaaaaaaattggcataagaaaatgaaaagcatcagacacaaaaccgggtctaaccattgaacacaaagaactccgaacaactggaaagaaatcgtctcaatgcatgggaggcgtttcctggaaaatgaaccggccaactttcccgatggcaacgaatgcatgcatatatgggccctagtccctcggtgacggggaaaggggtggaaaaaaaagagcaaaataatgtatttcgggggaacgtaagttcgtttgggggatactgcgcggaacggaaatttgaaagcaataaaatcatttttgagacgtgagtatctgctcattcctcgtggacgtgctggagatgattacggaggcgcaacgacgcaaacctagtcaaccgccttttcgcaaagaatcatctgctgcaataagctcattaccgccgttgatcccgtttcgaggctccattgatgacttggtgttcttgcggttcttcttcttggtcgtctgccatccataagcgatctcgttcgtgccgttagactgtccgcctgatcttcggggcgagtctgtgtgtcgatctttggtgcccggagtagaattgtgagagccatcgtgtcggccttggcctttgggcttgctcttgccgttaacaccgtttgccttgtcggaatggtcgccattagtccggcgcttcgagttcgtcgattgatgtcgattctcattcgacccggatgcagcaggtttctcgcccatctgtcccgagtgcttaggctggccgatttcctttcctgacccttgtgccgcaccattccttactcggtccggacttgtcttcgcgggttgctgtaccaggttttcggaatttgataggtggtagttctgcagcctactggcgagaagctcagactggccattcatgtcggactggttttccccgttcacaccattgaccttttgcgtttccgtagatggccgcgtgaagacagccgaatgctccaagtcaaaggatccggagtcctgataatcttgagacaaggaatcggagaaacttgcaggtgtgttcatgttgtgatcatctgacgaggtataatggctcaccgccgagtaagggtccatcaagtcagacccatacgccgagcgaggctcactgggacgcaccgatccatccacaatcagcggacctggtgcaactggacgtggggcggattgggtagcttgcgacgggggcttgggaactggaatgtgctccgagtgagcagtgtccgacgagaacgatcccggtcgataatctggctgaagaggaataaacgaatatccattcgagaccagacccatctgtgcggataatggcggcagcatggaaccttgctgcagggcttgaagctgttgtggggttatataataacccaccacatctggctgccggttatcatccacagaggttgagtgggatccattgctggccagactgtttgagcgcattacattctcatcaccactcccttctccgccttctgacgactcggtggccgacctttgttttgaccagttatccgtgggtggcggcatggtataaagtgggatatagccgggaagagagggtgagccctgaggccgtgcaggttgtgaatgcgcacgaagagactttggggatccgttcgcagttgacaatcgccgagaattacgacgagtatcaggaatagcactaacagcagacggtgagggagggttggtgatagtcgcttgcgagccagatgcaccaactgaagcataggtggggttataaatcgtttgatgtcgttgggttgggctgagagtagcatgactcgcggttcctgttcctgacctcgggcatgagttttcctctggaaactcttggggttggggaactgggaattggataaatggctgacggatgaagactggcggtggtctcccagtaatcaatgcctggctatgcaattgcatccgcaattcttgctcctgtgcctgcaaaagctggatttgttggtataactggtcatgcagaagatattgtgcttgctgttgtgcgtgcagggagatatcggttgcattgctagtattcgactgccggaagttcgacttgtttgcggtattcgactgtcgtcgcccgccagtgagcccgccgcgcgagaattgattattatatctgccgccgcggttccctccccgtccaccccgcgatggaagggagggtgtgagagttggccgcggttggggtggtggtcgttcccaggtccgctcttcttctgctgggaattcaaactgctgacaacatccttctagatcaccgtttgcgatatattcgaaggcccttcgcaattccaaatgcaatccccggaacgacgtgtcgtcggcggtgtttcctaggttccttgacgtgttgaacggctcctccacgcacagtcggttgttcaacatcaggtgccagcccttggcctctttgttgatcagggtgccgtcccgtactgagatgacgttcttctcatagtcaaattgatagccataataccggaaaaacccaaagagcaactcgccaaccgattgcttgttcttgcgaccaaattgacacaaggtcttcaggtcatcatcgaacgagcagaccaatccatcgtgagtcaccctcttcttgtgcggacgtgcttgcaaacttgggagaactgggggattccttgtctgcagaaagttaatgatcaaacagatccaggtataagaactaagggttccaccaagtgctgcatcattgagggttctttgctttgtccagtgcttgatcgtcattgccaaaggccgcactctctcatccacctcgacataggtccgaatcatccgagtgttttctagcgccaaggtattattgacattcatgtcacaggctaaacggagctccgggtcccaaatcttcacgatggggacctttgcatgcgacacacacaccacccgttccatcccatctgtttaggtcagtctattattcagtcaagttgtatcaacgcgatcccttacgtttggccaacacctcggccaacaggcacacatgttccaattccttgtagctggttgtgatgcaaatgtccactgcgcaagttgttagttatcgccttttatttctcttgtgcccaaaaaaagagaagaacctaccatccgagtcacttgaacagagcttattccccgacgagccaaaaatgttcgccttaatattatgattcggccattgctcattgaaaagcttctccaatttccgcacaagttgtcgtcgtcgatcatcactctcagcagacggtaacaatcgatcatacagatccatgatatcggtcgacaattttttctcctcgtccggactgagctgctccttcaatgcccctttctcctccggtaatatatctgctccgagactatacggtacccgtcgtcgaaagaatgccatggcggtctcatatttacatcctccaagcggtttccgggagaatgggggtaggtgtgtggcttcggagtgggtcgatcgaggggaggtgtttccgtgggcgggggacggcgaccgagaatggaaggagaggttgcgcgcatgttggtatggggtagaaggaagggaattcgactggtgcgaagtcaacggaggccgagcggcgggttcgggcacgtcagagtgttgcacattggattgcgatctccatgccatcgtggagggctgtgccgacgctagcgaggcgacgtcacggtgaagggaacactttgcattcccatcgatttttgcgaccatatagcaattcacaactcccacaccgttgtggtccttccgtacgggggctcggcaaaagagataagagtccactcccacacaccacacaatataatccgctcagtttccgctctggaaatgactggagaaatttcggcgatggataaattcgagcgaggtaggttatggcacgtgtgtaacaagtcaagggttcgttgatatggtgagacagccgggaagcagatcgtttgtggtgggagacaatcgccctcgaccaaagtcgcgaagagccgagtttttttttcctttcacgcgggaccgaagaaaatcgaagagatgtaaaaagacaatgcctcaaccaggagatgaaaataagacacgacaggcgaatagtcaaaaaaaaaaagggtcttcgagagcgagaagagagcgcaggtttcgaggattgggatcaaagaaaagcgacaaaaaaggaccaagatacaggatgcaacatacaatccgtgtgccctttcagtgaatttgtaggaaccagcctgggtttccgattgttgaggaaaggaagcgtagccagagaggggaatttgcggaagttgtgaagatgatcgaagccctggaggtcagcccctgtcggcggtaaagaagacactcccgaccgttccttaaagaactccaatctttccaacgtccacgattttatgtatagcagtcgagcaatcggaggaatgtattcagggccagtgtttgcaacttggaacagatgttggtgagtgggaaattagcttataacgtatgacggagtagcccacggagagcgactatcggggaatagttctctgccctcatttcttaaacaattaggggctgacttcggtcctttgtctctgatataatctctcgctaatatatttcttactagcactctttgttctttttcccccgagcccagaaacttgaagccctgaagcacagaaagccaatgcagagttgcccgcggtatcaccgagctatgcattcatgcaggtaccatgacgacagattattgataacccggtgtatttgttgagcctcttggactactagctattgactgaacatggcaattcctaagagaagccttatatgctccatatgtcgtactttctcctttttgcctcctgatcgtcgttcttcacttctccccgcgatcagcatggtccttgcacgtgctgctagtataagctaatccatgtcagtggcctgaggcataaatatgacatagatactccgtatgcttcagaagtaactatgttgtggaatctaagattctgtaacatacatcctcggtgactcaagagcactcaatcatacttcttctttgtttgggaaatgaatccaccatggacccataattcactccggaatctgacagtggctgcccgtattataagacttgagcggatgaaccttgcgagataatagccattggatattgttctggggctaaccgaagagttgatcgtcagatggtagcctttgtctacaggactgggtatcgccacattgggaatgtgaggcttgttttggcgtgtttctttgtaaaactatctacccctcttcaagactgactgaacatctagttatcaagattcaagacagctccagcttgcgacttataacgtgaccttcataaaatcaagcatccggcttgtatgactaggaccagattcggccgagagcagttgcatgtatgacgagtgggaagttactacgcttccgcagggtaacgcggaggcatgcttgcgcgtatcgtctagttgtaagttgtatctttccggagggtttaaagaaaagtgctgatgctgtagcgtctgctggatcaacctatacagacaacagggcagagttgaaggaaccgataactcgactgcactatcaaacgcaaatccctctcctactctatatcttttgagtacctcggtacctgcaatatcccgctataaagtcgattcaccccgattccacgtatagaaatggtcccatgtacatgcggggaagactcgggctgctgactggctcgtcaagccggctgagtacatacatgaacatcgcagcggccaatccaactcagaggggcgcggaccttgcggaagaatatacgaagtaaaaaatgatggccgtcggacgttgccccacctctcctgaattgaccgagttggtcaaagcacgttcaaagtgtattctggaagcggcaatgtactgactagtattgcattacatctaccccatgtgtacggagtaggtattgtttctactagtatatctttcaatggggacttttaacggacctgcttcaaccatatgtatacgaggctctctaaatgagcaggctacagcaggctacatcagcctacagcggactatacccattacatgcgtttgttctgcgcactttccatggagctgcagatcaaattccagatgcgactagagtgttcacttgcagcctccgatggcgtccataggcagagagttcttggcaagctgactgcatagtgcagagcctttgcagattccaaggttagcatcatcatacgttgactccagggaattccttgtttggaccgggttgtattgtgaagataatcttagaacaacttggaaagttgaatctttgaatattgtactgaaatggagtataaagacgtagggcatacaagggcaacacaatgtcaatgtccacgtttttaacggtttccaagattcgagcattaaccttcaataagatatagcatcaagtatactccgtacagacagtaatagttggataataagtaatcgtaactatcagacacgaggaagctcgacgcttagcccccgtgtccccgtccaatctccggtgaccggccccatcagtgacgaatagaagcccttcggttgccgggaattgccgcgtacttgggatcttcgatgtacaggaaaaagaagggaattgctcaggtgaatggaagtggaagcattgaatgacaaatacggggattgtcgatgttcagtcgaatgtgcagagacttgggtatatactccgtccagacggagtactccgtataccgttgtaaacataagatactaacaaaagaacttggataagtatctaacatgtgttgtcctactttcagaataaataaaaagaaaaataacaatctcctatttgcccccgtatactgtcgctatgtaactattttcctctttggcaaggcaatttatgaaaagaccccctccccccataaggtaatacacacccacccccccataggaccctctctctctctccttttctcttcttcatccttccaatttttggactttctctgcctcgttcactcgtggtagaaagaaatactcggaggcttatttgctgtaagtgccatgattctatttcgatttccaggctgggattttttcttctataccctatataccccattgaagatactttgaaagagcgcggaaaaaacaccctcgaacggttttaccgagcccggggtaaaaataaaaaaaatatctcaaatttcgagtgtttcttttttatgtgttgaaagaagatctggagaattgtttgaaaagtgtgtgttgtggatcgacgctcacatttttttactcgacagatcgcctctgaccggatcaatctcccccctcccctgaacagtcgcaccctccggtccttttgatctcgacaatgtcttcgtactacgaacctcagggctggcaagcacccgctgcgcgccaggtctcttgggagcagccggcgcctccctcccggtcaggtatgggatcaaacgccgaggacccccggcaaaaactgacattcgacaacaggatcgagttcggtctcgcagcgcgaggatcttccggccttttcctcccaatttgacggtacggacacacttctgcttgaatctctacaattgcttatccggaagccgaatcgcataatgggggataaagttgttgattttgaagcgaggcgattgtggagattacctgggcatactttttttggggggcacccttttggagacaagtgctgatactttttttttaactttatagaggtcgatcgtgcgatcgacaatctcgtcaagagcgggaagttgtggaatgctcctcggcgggattcgatgcccatgatgatgggccggccctaccccgactacggtatgttgcgggcacggatggcacccagaacgcgtttctgacttgtctcttgacagaccctcgtatgggtggtggccctcagcgacaccattcgatcagcgagttcgatggcaatcgtatgcccccggcgggcaatgcccagggtttctatgcctcccagcggtaccagggtcgtcccaacgaggtggaacagatgatgcaggcgaagcgtcggatggcagcacagcgtgagagggaactccgcaactatcaccaggagcaacagtacaaccgaagtacgtggtagcctctgtcttcttctttttgagcctcgttatattcccccgtcggctttttcttctctctcttttcacttccttgcatctatgtatccggcctgtgtaatatatttggtttggctgcttcgcttttcttttgaacacggggttttaatacttttcttcttcctttcaaggcctcctcgccgagatgtctgcatccaaatccgaccgatccaccagcccagctgccgtgagcgaggacagccgtcgcgaactcctcgcccgccagcaccgcgctctgtacggcaacgaaagcccagccttcttcccgcccggtgccttctccgatgataacccacgcccggatagccaagccggcggtggcaccccgtcgtccgccggtgtccgtggatcctccccgcgaggcatggacccattcggcctgacacaggccggcgctactggcaccgatgccaccacgggcctgcagtcgccctcgcgcgccaacagcacctcctcgcctagctccgctattaacgctagtttcggcggtgagcagcccgtaacctcggcttcgtcgcccggcgcagactctccctcccgccaggcctcttccaagcccgctggtcctattggcaccgtcggtcctatcggttcccgtcctgctcccggccagacatctgcaccccctgccaatcaagccttgaacaagcgctccatcacccctctcccctccccacttgggctcggcttcactcccgctgatcctactgctgggcccgctactgagcgcacctcctccgccggtccttccccggctgtggcctctgcagccggtgcccctggcaccaaggaccaggccggtggtgttggcctcggctggagcaacggcagtggcgtctggagctccaagagcggactgggcgtgcaagcttccgtttggggatagatatccacttttgatgacattactccaagtgggcgcttgttgcatattggactagggttgtgctggcttaccatgtacttggcaggggagaaaagggacagggtttaccgggttttggaagtggtgttggatctgtctggatgatatgatgtctgcttcgctttctcctgtgaggtctcgggttcagcatgtttttgttctgcttttttgtttgttttgctatgtcggtgcccgtgcgaatatggtcggaaatatggcgctttatctgtgatgctcgtgggctatgtatgggctgtctcatttttctcggtgtttttcatgtcggatgcacaggtctctttcttcatctttctttcttttttatattctggggtgatggtacgggaaacttgcacattgtgactttattttaatgcctgttttttttttttttttactatatatctctatatggagatgggaggcgaaccgaggctcaaaacggatatttattggatttggatattcgacttctacttgtcttttctttttttcttcccccttctctctagagtgggtgaggtttgattatacggttactggagtctgtctactttgtcctcaacgggttttggcctcgtttcgacgtgatcaggaagcgaatgttgtgtctttacatacctattgaattctcattcattgccggcgtcttgtcctgtacaggtgtgtaggttcggcactatatgtctctggcctcacggcacggtatatatgtaactagtcatgtcttctatttagggcttctcatctcgcaatctggtagtgatttgtcttgccatgctacactgatatatatctctattctagcttagtttaatcctactacctctaccaggggttcaatgttgtttctagagtacgctgacgagataactagatactcgaatagagggtaaattgtattttattcccgaataaagattggtagtttaattccaacaagatagatgtagcaattgtcgagataattaagcattagtcgaaagcacgtaaacaagatcgtctttttcttgacaggcatctaacgcagcacacaacatagaatctagaagatcttcggtcacatctatgatccccacaaagatgataaaaagaaaaagcaacgaggatatccaccgggattcacactcaaacagcgctggtattcaccgtgggagtgtgttttgaggtgtcgtcgggggtttgagtttgatcctgaaattcggcagcggtagggatgacatgcacgatcttcctcttggcagtgaagagaccgacaacaccacgctcctggttagctccaagccagggcttgcgggcttcactcaagaccttctgggccaggaaatagatcagctggccgatgataatcagcacaaaggcaatcgggtacatccagtggatatgataatggaagaccttgacgccaatgatcacaccccagaagttcatggtgagcatggagacgttgaagaaagccgccgacgagagacggaacaacagcggagcgagacagtagaacatactcagacacagcgtgtacccggtgagatatccaccgacctttccgttccagtgcgcattgtggaaggaggtccggtcgaagatgccggcctgcgcgccgttgataatcattccgaagaatgacatctgcccgagcacctcgtacactggccgagtgctgacgaagtactcttcgcccgtgttggtgaggccatagaaggacgcggctagcagcgcgaacatgtcgcctttcagctggttgccttgggatatgtctccgccgttcgtgccggtgatgtggtctgagccgatgaggacgcccattccgccgatacaaagcaagataccaattatttgagcgatgtggtagcgcacacccagaaacaggaatgagatgacgacgaccacgacgatggcccagaagttgatcagttgcgcgcttagcatggttgtgtattggtatgccagcacaatgaagtagttgccttccacgtcacagaaagcaaggatgatgtctgcagcggttagtcgttgtatattggatatgtgggaggggaaactggggcatacatttccagccgtcacggtataccagtcggagccagcccttgaagccgtaacggtacatcgtataaggagtaaagataacgttgagtagcacatagtttatgaaggtctggaacgcagggattgcccattgttcctcgccgagtagcgttgtgaaggtacccgtcgaggtattggcaatagcgagaatttgactaggagcatttgggttagggtttgagggttgagctgcagtgtttgaactggttcttaccctagaagcacggtaatatagaattctttagtcttaaagtagccaaaagctcctttcttctgatcgaccagatccgcaggttgcacagggcactcggaggcttccacctgggaactcgaactttgtgcacccgtttgagcatccttagccagtgaattggtagagctgccatgttcgacaccagatgcctggacggtgatttggtccttcgactcagacatgatggactgatgcgagctcaaaaagcggggttatttttgaatgcagtggcaaaccagttgcagattgaagcaacgtagcaagaaaagggagctttatgaaaatgaaacgagcgcaaaactccctaagtcgctcgcggattgatatcccggttgaggttgatttagatgaagaagcagaaatctcaaaagcaacccgcctaagaggaaaaaacgtctggaacctttcccgatcgggccatcgtcgataagaaacttccacgctgttaagcacagccaatcagcgggaggatagtggggacggtgagggtctgtgctgcggacagggccgtccatctggtcttgttatgtcagcagcttcaagcaaggtggctggtacttggcgggtactgggagagacaggctaagcatcagcctggccgaagtaccttccgtgtaacctacatagcttgtggagatccatgcgttgagttgaccttgcagagcatatttatagatttatagattgatggatgaatcttaaattatattactccgtacgggctttctattgtacacgagtcagaccctgttaactataaataccttatgacatcttgactgacgccattccgaaacccctgagagagaacattgaatggattccccagctctgccgatcacggaagaacaccagaatcacggagatcaagtagtctcgatttagcataagctgcattccaagtggtatcgcatatttctgccgcgtgtgcacaataccataggtacctggtgcccggtacctctatagtcggacgttgttagaaatatttaggtaccttaggtacctacgtcgatgatagagatgaaatagggataaacagggagcatagggaatcctggaagacccggaagttcccactctctcttcacatcctccaaagtagcttcttgcgaaactcccggggtctttaaggggaaaacaagttcccatattccaagtacctgccgaggccgtcaggtggaccaggactgtttccgatcgtcatcccctccgcagactctttcatcattgggatctccacctccattccctctttgcgtctgtttcaagccctttccaaacaacccgtacacaatcctccgataaccttcttttaatttcattccgttccccacccccaactgccctttggctctcctctcgcgccggtgcacttttatcaggcccggagtgacgagacgcctttccctgttcttgccggaccatggcgctggaattacagccgcccgacggtcgccgacgagtgaaggtttatgaactaagagataatgattggtttgaccgaggaaccggcttctgcacgggtcagatcttaggagtgagttgtcgcgtgttgtgcgcgtaccggggacgtgcgatgtttcatcgcgcgcaatcccgagcgcatcaccaccatcgtcagtagctgattgctttggactaggaggaacctcgcatatttgtcgaatctgaagacgtgcctaatcgcgtcctgctcgagacgcggatcaccaagaacgagggctatcaaaaacaacagggtacctatcccgccattatcggctcatcgctgttggagatcttttttgactaactgtcacgcgatccagagactttgattgtttggaccgagcagaatggcacggatatggcgctgagcttccaagaggcggaaggctgtgcggtcatctggtgaggaatcaacaaaaatctttgcgcgcatcagctaaccacgtcgaagggattttgtcaatgccgtccaacaacatctcttgactctcacttcagctggtaaggtttgtcgcgtgtttggaagctggcatctctaattgttttctaagatgacgctttgtccgacgacctcgataactaccagtccatcgtattaccgacccccgaacttggaaacctccccgaaatcgaacagattgtacgagctgcgagcatgacacagggcggtcgggatgcgctatccaaatacatcattcgcgacgagtacatcgccaaattagtaccgctagtgacaatggctgaggatctggagagcttgatcgatttgcatcggttgtgcaacatcatgaaatctctcatcttgctcaatgacaacaccatcatcgaaaccgtcgtcgccgatcatgtcatcctcggagtggtcggggctctggaatgtacgctttacccggcttcaccctggcgaatacaattgatactgacgaaaacagatgaccctgaattccctacacataaagcgaaccatcgacaatacctcgcagacaaatcgcgatacaaggaagtcgtaccgatcaaggacccgatcattcgccgcaagattcggagtacatggaggctgcaatatctaaaagatgtggtattggctcggattttggacgacccgacgttttcagtgctcaattctctcatattcttcaatcaaatggagattgtgaatcatattcaaggaaacgggccctttctgcgagacctctttcaagttttcgacccgagaaatccggaccagaggcgcaaggacgacgccgtgcagtttcttcaccaatgtgcttccatcgcgaaaaacttgcaggcgccgtcgcgggcccaattattcgccaattttatcaaccatggcttgttcgccgtgatagcgttcgccatcaagcacttgaatccagctatgcgcacgactggtattgatatcttagtgattttgttggagcacgacccagtcatgatgaggggctatatgctcaaggccgtcaacgagaaaaagacgccactaacagacaccttgatcgaccttcttcatgtggaggccgaccttggcgtcaagaaccaacttgctgatgctatcaaggttctccttgatcctcagattcccatgcaggacccgcttggtcgggctggacccgattacttcaaacttcgcactaacagccttttatctgatgcatttgtccagcaacattttgacgagtcctcaaagcggcttttccaaccgcttaaacagcttgcaaatcgcacagcccgtacgtggtgaggtcttctgttttggtccagaatttgctaatctcgagtctagttaatgatttgacattccaagaggtcaccctctattcgcatcttgttgaaatcctcaccttttttgtccgccaacacctcttccgcacacgtaactctatacagagtgaatctcttgccccccgcgttgcacagcttctgcgggcaccccagaaacacctcaaactcggttagtatacatcttttccccagaagccatagctaatacagacgacagtcgccctcaaattcttccgcaccctgatcagcctccaagataccttctaccaagctctcatgacacacaataacacatttgagttgattctcgacatcgtctacgagacaatgcctcgcgacaacttgctcaactcggcctgtcttgaactttttgagttcatcagacgggaaaacatcaagccttttatcctccatgtggtggaaaaatatcgcgagaagctcgagaacattatttatgttgataccttccagagcctaattcttcgatatgaccagatgcagggttacggagccgaagccgatgcgacactgttcagtcaggatgaaagtaacgctccgcggagaattcctctcaatggccagcgctggcagggtgcaagagagatggatcccgcggaagaggattatttcaacacgtccgatgatgaagatgaggtaggtagtagcacttggattgagacaatttgagaatacgactgacaagacaagatgaagtgggcacagaaccgtgtggctactgcggatgaacctccaagcggatccgcctctgcggttgtcaaacctttggttgactacccagatgacgacgaggaggacatcatggacaccaaacctgaaggggcagggcaacagccagtggtcggtccaaccgagacttccaccgaggttcctgcatcaccacccacacagaaccctccggagcgacttgcagagaaacgtcgccgtgaggaagaagatgatgatgagcttagcaagcttaccgcgggacctaaacgaagaagttcaacgagcagcaattctggcgcctttaacatgaatcggaaaaagagtttatctgccggatcactgacagataagaatgcctcaccgggtgtattaaataatgtcaccagcgcggcgcctaagagaatcgccatcaacattggatcaacggccaaaccgcccatttcagaaactgacacaacccgcacagaggtgacgagcgagatttacgagaaggagaatcgtgacgatagtcagggtaacgagggtggatgaatacctcataagccaggcgttttgaattaagtatcctttttcatgacctaaataccacatttggttgcgggatttcccatgtttcatctcttgctgttctttgggcgatgcccatgccccttcttcttgctccttttctttcttcggggtatccctcatctgttttccagtggtcttgtcttctctggcctgaactagcgtctagttgaatgttgtacatggcatggcgtctgggcaatgcattggatctagccttgcggtgtctattctttttattttcctggtcgggcttagatatcgaccggtggaggaccatgcatccgcggatggagtcgttgcagtatcctgccattttcatggtgttcgttacctggaattatcttctagtgccgtagatacggcctgcacacctaccactatcaaaatacccatagagcccgggattatctctctccgtggttctttttctttttccttttctgctttctttataaacgtatcatatattttcgggtggtcgaggggctagcattggtggttctactccatagatgtagagtgcctggatccaccagccaaatccgacttcacctccccatcaatcctgcgcgattcattcaacgaccccggagtaatcatatacacaaagaatacatagaaaagggtacaattcgtgtaattatactccttcaattgtcttatattatctatctggacaatcactaaccgaggccagaccacccaacgaccccgtagccatctatataccctggataagagcgcgctacagcagattccatgagacaagccgaacaaaaatggcatccgaaattacctcaaatacctttctcaccaccacaggttctccatcagacccaaagacgacaatcttcttcatctccggcaacccgggtctgatcggctactaccacccattcctctctctactttcgaagtatctaggcgaggaagaggaaaattcaccaagcttacaatcattccaaatctacggctcatctctcagcggctttgagattgacgaacaccagccctcgccgccaccgaacaatggcgttgatctcgatctagaaggtcagatacgctttgtccagggaaagctcgctgccctaatgggagaccaaagaagcggcaatggtaacggtaaagctaccgtggatgctggagctagacagaaagtcatcctgatcggacactccgttggcgcatatatcgccatggaaatcctaagacgacaccgcgaagcgagcccagaaagcaccttcgatatcatcggcggagcaatgctcttcccgactgtcaaggatatcgctgcgtcgccttcaggacagaaattgacggtacataatacgcctcttgccagatgcttgtgcttttcttttccttcgcttgttgctaatcccggctcggttacgtagactctactttcaatcattccccgtcttgcggtggtggtcagtctcttcgtccgactacttacattcctgctcccgacatcgcttcttcgatatgtggtccggctcgtcatgaacgatccccctgctcatgctttggacgctacgtgtgcttttctgaagagtcgcggtggggtacgacaagctttgtatgtgtgatattctttcttgctatgtttaggctttatctaattactcttcgtcggctgctagacatatggctgctgatgaaatgcggactatcacttcggataaatggagtgatgatgtctggggcgctgcatcggcgcgtgagcctatcgcaaagctgtttttctattttggtcgtaatgatcactgggtggctgatcagacgagggatgacattgttgcggtgcgtgggcggaagggaggacaggctgggccgactatggttgtttgtgaagagggtttgccacatgctttctgtttgagtaagtggatttcaatcgactttgactacgatatgtagctttgctgacagtttatagaacacagtgatgtgatggcacgaaaagtggcggggatgattgggcagattgtggcttgagggagaggctatggcttttacaatctatgcatagaatagacaggaactacataaagacaatgaatttcgcctttggcgcagattgtaacgggtatctcaagagacgctacgccacgcccattcccatcagaatgaaaaagagcccaaagctattcaaatatacaataaatcataaagctagacgccatgtacaaatgattgacggccgaaggaatgttcagcactctattgcccctgcccctgcccattgctgttgccttgttgagctagccctgctctccggaataaatctcctagcacatcggactgcggctgcggtgggggagtaggatggtgaggcaccatgtgttgatagctggattgctgtgggtattgctgcgggtgctgattggggcctagatggtgtgcgcgcacactccaagaatcgtcctgggcgcgctgctgaccaaacatgtcttgcagcgaaatatgacgtcccataggcaccccagtttgtagttcctccatcggaggtgcctgtgtggaagccgccattgctgcggcgtgcaagctagtctggcgcatagcctcgagacgttcgcgagctagcttcatgctctcccccgcgtgggtggcgcactcgagaatcatctgggcatttatggtgcgactctccgcggtggagtttggcggcggctctgagtagatccagagaccgtagatgcgcacgttgtttgtgccggtttggttcttggacaaattctgggggtgcaaggggtcggcgatgccattttgtccagcttcgccttcggcactttcttcggctttgagaatcacatattcctctgtaatttcgacattctccccctcggtgagagggagatcgaagttgtccaacccgcggcggtttaccacgaaggcagtatagcgatcttcgcctagctcaccctgtgtttcctgacacacaaacagggttccttcgactccgttcttttcccattgttttgtcgtggggctgaagatgtaaacaactgcgtagggggcgagtgagaggatggaggtcactgagggcttatggcggcggataacagagaggttgagctcttcgttcgagcggagcgggggtgcaggttgttgctgcatgtcggagtagtatggggcgtcagattcattatcggtgaggttgacaggattgtgattgttctgtctccgcggtttgcgtgcagtcatattttctgttggaacccttggaattgtgcacgatggaaggagctggggcatatcgtcatggcagctccgccttcgcgcttatccggcgtctctctactttctactttctctctactctctacttgcgcctcttctcttttgaacctcatgtaaggtaattgggtactggcatatatttgattcctttctgattggtctcggcatatctccttccctaaatttcgcgtgatgaggatccgatccttctaaaccttggtgggatgacacctgatgaaatgagccattgtcgcattatacaaccaattcgctcaattcgctcaattccttctatttatcctatggtactcattaccgcttcgttcttctactgcaacaacactcataccctattttcccttgccggaattaaggaccgcgcaagcgcacacattcatacatacatcacgctacatactgctaccccactgaacctccaaccatagccaagcgaggcaaagaagctttatattgtgatttcacagacaatcacacaccatgagtcctaaatcgcaaccgtcatccgcatcagagcacaagagccacgaggccgaatacacggaagaaattaagaagtcaggactcgacgttctgtcactttcacgcgcgatcagagcaaggaaagccgagtacacacgccggagatcgatccgagtcaaggtcggcacgtggaatgtagccggcatctccgacaccgagaaggacgttggaaggtggtttgttcagggagaaggggtgtgcccgaagttctctgggacaaactacgcgcacgagccagaatccgattcgcccagcaagcccgacgagccaaaatcagacagcgataaaaaagtaacttttcactacagtcccgaggaggtagacctgtacgtcttgggcttgcaggaagtggtcgatatctcttctccaacagaagcgttccggccatatgttgacctcacaccgtccaagcggtggaaggaagctgtggaaaaagcgctacccgggggatataagctagtatctgaagtccagctggtcggcttgttgcttctgatatatgtgtcgcccgccattggagacagtgttgcttctgtcagtagtacatctgtcggtacgggactgatggggtacatgggaaacaaaggcgctgtggcaacgcgcattgtcctgggcgaaaccacccgtttggtctttatcaactgtcatctcgcagctgggtctgacaaaggcagcttggagagacgcaactgggactcttctcagattgtccagcgtgctagatttgacgcggtttggcccgaggatgacggatcgggcgaatcgggcgaagcaataggagatgaagatttcactttctggtttggtgaccttaactaccgcctcgatgatatcactggcgacgatgtgcgccaagtcctctctcgacataccgccaatcagtacgacaaagagcgccaagaaaagatgtcttcaagcccttctggctctacggccgattctgatgatgattcgccttcctcttcttcttcttcttcttctccggacgaggagacggagtcagtcactgcaactgtcaccgaacctgtcaccgacgaacagattgaccctcataatgaccccgcgtctcttcaaactacaattgcctcacttatcccgcacgatcaacttaaacttcagcaaagaaaaggatcggctttccacaagggttggcgggaaggtcatatcactttcttgccgacgtataaatacgacgttgggagtgtggccatgtttgatacgagcgagaagcagcgcgctcccagctggtgtgatcggattctgtttcgtagccagcgggataagctgagacatgagaagctcgatcaggaagcggaggaggcccgaaagagggacgaggagatgaaggcaaggggactggacaaggctgttgccgatgataacgtcttgtttgattatgaccctgatgaagacggtgcgaacagcgaggagtacatatcggacgaggatcaagccgctgatgatgatgatgatgcaagcacaattgcatcgctcgactcttgctatgatttaatccgcttggaccattacgtgtcacaccaaggcattctgtcgtctgaccacaagcctctggatgctacctttaccttgagttttgatgcagtcaatcgcgatctgaaatcaaaggtgcatcaagaagtggcccgtgaattagacaaggccgagaatgaagctcggcccgatcttactattgtggtggatagacatagtgaccataagcgcccagagaaagatcctgacaccgtcgatttcggggatattgccttcgatgtgccagctcatcggtccctaactattgccaacaccagcggcaccccggcaactttttcatttgcggagcggcataaagttgtcgacgagacaattacacaaacagcctcgtggcttgttgtgcgtgtctgcaagtctgcagacatcgccccagacaccggcccatcgatggcttcttcgtctgagagccacactctgctccctggtgaagtagcgaatatcgatgtcacggcttacgttcgcaacatcgaacacgtccgattgcttaatattggaaaggtgaatctagaagacatccttgtcctccatgtcgatggcggccgtgaccactttatccctgttcagggccgttggctacccacctgcttcggttgcagtgttgacgagttgacccgcatgccagaagcgggtgctcgaagcttggccgaatcaaaaaccccacacccatccatcacagatacttccacggaaatccgcctgtcggcaccccgcgagcttttccgactgaccgaggcgatatccgagctgacagagcgcgctgttgcagagtggagcatgacaaacggtgaatccgaggagcataaagctccatgggcaacggatctttccgggggagcctggcctttccagcctgatacatggactctaaaggacccacaggagcgtgctaagctgcgaaattccgtgcgtgaagctcttgacaccaacaaatccctcagctcaatatttgcccctgagatatcctctcttcatcggttggaggtcctatctgaaaccctcctcactttcctcaactcgctccaagacggcatcgtcacggcgaaagtatggcaagacatggagcagcagatagctgcgcgggagaaaagcaaatcccctcctcgaaactgggaagaaagccagtcctgggtgcttgagcacctggcctactcaccagcgcacagcgtatcattcacgtttgtcacttttatgctcgcccgcatagccaatgaagtggctccagtatcggccggtacgccgttgatcccattatccaagcaaaagaacaacgccacccccaataaaccgatagataagcaggccggggctgcaagccagaatcaagcccagtctcctactccagcttccgctactgccttcataaccagcggcagtttccgccgcaagaaccgcacctcgagcacatccaccagcaccagccctgaccccccacctcagaaccattcaatagcacgccgtcaagcagtcgagactgctctagcgtctgtctttgcacttgtgcttatttctgcctctgctccgatgccgtctaaagagaaagagcgtcgtatatctgaagagcggaggcgatcgatcattgagccattcttaaagatggttggggtagatgatcgaggtccatctgggggccggtattgattttttccgaaccccgtcatgttttgactcccatagacttggcttttgaagttgttagattccatcacgttgtctcgatgtgtataatgctgtattgaggccatgtcttcacgttttcctctagagatcaatgatacaggctgggcaagcaatttgaactaaagtcaattttcctatcctacagtccatgataaattatgctccggaagtgcttaagttaatacatgcacgccaatatactgatcgctcggtcatcaccccaatacccctcactaaatactatgcagtcaacaagaaaacaaaataaaagtccatgcatatccccatcaccccccatccccattcctcacctcagaccgccgctgcgacaccagcccaccaccctgccgatatacaccggatgacccagccctagccttccccttcgacgatttagacttcgatctctgctgcggcgcaggcttccgcccgatcagcatccgcttcgccccaagccaacactccgagaccgcacgcccaggcaaaccgaccagcgacagcgcaatccgagcagggacgacgacgcacgcgcaagcccagtccagcaagacgagcgcatagtttggacgacgagactcggccgaccgcgtcgcagcagccgccagcgcaagcgcgtcgccggcctgtgtctcgaggcgcacgaagcgctgatcagtctgcagggagaagagggcggatcgtttctcgtagcgacggacggcgcggttgagggcttcgatgtcgggctggatagcttttcgggtttcgagggctgcgttggcgaccagggctggggagatctggggttggtcttgttcttgtactttttgggaggggtctttggtgtttggttttgtggcgagacgggcggttgctgtctctgcgacgtgggcttcgagctcttcgaggcgtttgactaggtcttggagggttgttggggttatgattgggtctgttgcggatgatacgatgcgttggaggtggagggtgcgcttttggattagtcttaggaggtgggagactggacggacttcggaggctaggaggaagatggttaggttgtagtttgatactaggccctcggagggtcgggagagactggagcggatagcgtggaggagaccggtgccgactagagggaatatgaagcaggtggctagagcgatgagctcgtggatctggagctcggagatggctgttgctgcatccttgtgttgttcttggtcgtcgagctcgaatgggggatcgccgggcgctggaaatccactttcttcgtgtcggatggcctgggccgagcgataccagtccctttatatagttcatattagtactttgtttggggagattgtgggggagggggggccataccaaggtaaccggacagaccagttgaggaatatagcggccaagactagtattgtgacgtcggtgacgaacgaactaccttcatggaagaaaatgcctgctattgcgggcagcagggccaggcctagcggtgcagaatgccaatgcgattcttctgtcgagagtgtgccatggcctttttctacacggggtagaaacaagtcgtcggtcgatgagcggatagagttgcgggcctccgagagcgtgtccgagagggttgagttccgtcgttgattttcctcaaaggtacgggcgcgacgtatgttcaagggccgctgagtgggtgcatccgccatgttgtttctgaggttgggaaaaggaacatgtgtgtctcttacttacaccatacggcctggagagtatgggatacaatgccgaggatgatgcaatgaggcccgacactccagggctttgacttgaccatcgaagaacatttgaataactgcatataaatatgtaggtagacttcctaatagtcaacatgaatatctcgcattttatatatcttttcctatatgattctatattttggcggctaacacccataagagactataaacaagacacctgagaccaagactactcttgttactagctatgtagcttgggaactatgccatatctaaatagtagactattcagtaacgagatatagacgcattttaactatttctattgttgcagtgtcatttattgttagccgagggtcatcctctacggactagacgcatcaactctctcacacctttaaaatctggtcaatcttctaatttccccaacctgatagactagacagtctagatcaattatgaatcattcatctcccatgccgaagtcaaaaataacaggcggatcagaatgaataaactccctgccctttcgggtctattgacacccaaatccggactggggtgcctcacactattcgctcaaccacaacaccccagacgatgggcttcgaatttctttattcggctcctttcatcttctttattctccttattgcaatttgttcagtctaattcaaagctaattcaatggacaggtttctttgcttgttgcagaatatgtcaaggcctggtacccccggccgtgggttttgcttctgcagcccatacctttctctgaatagtacatgagtttgctcaatacacgatgtcttgagctatgaatcaacctcctgattctcactattcggatctcaataagaaatcgctgtcaatcacctcccctggctgagtatacttcatcgagagaggatggttccaatccattcttctttctttcatactatctcttagtctccttgatcattttgcaagagaactggagttccagactatctacatattctttttaatctctgttttacatctgccgtcatggatattcaccacagatacccgcaggccgtggctctaccaattctatctattttctccattgctctcgctattccgccattaattctgcatggaaagaaccgaaatttccctgctactagtctgatattctggtcaatcctcctcaacttgttcaacatcatcaattctctcatatggcccacggacgacgtggcgtcgtggtgggatggagctggtctctgtgatatcgaggtcaagtttatggctgccggctacgtgggcatcccaggaagcctggcatgcatctttcgaagtcttgcaatcgtactggatacagaccgggccacattagtcccgagcagaggtcaacgctggcgcaaccagtgcatggagattctgttctgcgttgctgttccagtcaccgcaatgatcacacatatcatctggcagaagagccgatacttgctatttgccatctcgggatgtgtgaacaacttcgacgagagctgggttagtctcgtctttgcatggatctggccgccgattatctgcctcattgcagcatattattgctgtaagtatactcccaactcacttcaaaaacactccattaaccaaatatcacaggcctggtcctcatccgcgtacacaagtaccgaagcgacttcgcaaacatcctccgcgcctccagcagcaacctcagcaaatcccgcttcctccgtctcttcttcctggccctatcaatgcttgtctgcatcctcccacttcaaggctacgtcgtctacaccgacatcatcctctccctcccctggcacagctactcctggagcagaatccacaacggagaatggaacaccatcaccaaagtccccatcgacggcacagtcttcttcgaccgctggacccccgtcgcatcaggcttcatgatcttcatcttcttcggcttcggccgcgacgcaacccgcatgtaccgcacagtcttctggtacctcggactgggctactgcttcccgagcatcgagcccccaaccgatacgcacaactccggcccttcagcggcgcacgcctcaacagcaaccacgctcgtcggcagcatcggctcccgtgcgaaatcaatgttctcgcgacagaaggaatccttcgctacgtttgtctcgacgcatggcacatacaacgatatcgaaaagggctcttcctcgcccttgtcccgttataccaggtctaccaggaactcgcgctggaatagcttgccctggtcgctctttaacagacgccagactcgtcaggatatagatgggacgctgctgaatgacctccccgttggtacttcgctgactgtatcctcgaatgcttgggctagtcgtcgtgatagccgggatctgtctagtggacctagttcgcctaagcttagtaaggatttcattcatgtgcgccaggttattagccagcagagcgaggtcaggattcaggtctagtgggcttgttcttcttctggttgtatctcggcttgcagtggtttcattacggtttgctcatcttgcgtttgcgttggtctgggtcatgggatctgttgtctagcagagttttacttaagtatcataatacataatttgatttgcgcagttgtgccccacacagaaaggtagaagagttcagcgaaggcgtagtccccgggttggtggtaggccgggatagatcctgtctgtggcttatatttcgctggtataaagtgaaataagtcacaacttgaatctacgaaggccaatattttgagaccaagaatcgagatttagcatactaagtctacatcacacgctaccaaaatcaaatcatccactagaaaacaaaatgtatccagggtattgtacatattatcacaccgcaaaggaggattcaatcaatctcaccagccacgaaatataactagcaacatattcagattgatcgagccccaatcaagccatttactgagactcgtcggagtgaccggagttatcgggccgcttaaggacctcgagagtgcctagaagaatgttagatcgaacccttttctctcttgctctgggaggctaggagcagatccagtaaacgagagatcgacatacgctgcacaatgttcagagtggaccggttttgaccctcggaatcttcccaagtggacatcttagcatcaccttcgacgtacaggagggttctgcgggagaaagttagctcatctgcatcaagctaaaagcttaaatagctgcattggcgcaagttgacaggaaattgagcagggtaaccccataacccaacctctgctcaaccacatgacatgaaagagtaacgtctcatccgaaagcgcgtcgcttgaccgccaaatcacctatcatatgttcaaccaggcccgcgttgcagatcatcatgcagccttcaagcgcaagctctcgctctcgctcgcgatccgcatagactgcacacgcagacccaaactcaaacgacaagatatagcaaacacacgacgaaaaagacgcaatccaagcatgcagccgcacaagccagaaaagtatcacgagtagccacttaccccttctgcaagccaaggatgaaatcgcgctggccgccctcggggacgaagtttacgatgcgccaccagctggtctgacggttctcgcggttgccgtgggaagtggcaatggtgtatttgatgatctcctggccggaggaggtggcatggagctcgggctctgcgccgaggcggccagtgagggtcaggcgggcgatggcccagttgggcgaggtgctgaaggtgcgggcgtaccgggggatgctggccaggctcatgctcaggttcgggcgcagggaagagatgaaggtagacatggttggatggaggacgtgtgaattatggtttatggtaaggatggattcattggatttgttttggcgtgtgaacgttgttgaccataacacgtgatgtgtacatgggctaccgctttcagatgtgatatagtggcagaaggcactattaggctggctatcaggattattattggttattatggtttgaatcagggattttggttgcaattgagatatcctgtagattgaaataagtgctccatatttatttggtgaagctcataagctcatgcgagagagctatagctagctctaccccggaattgccccttgtgcagggttctatctacgggtgcagacagctagttataagcatcagaattagaaatccaacgtctcgccttggatgtcccgagtcaaaaggaaaaagaaagcaaggacaagcaagcaaagaaatgcaaatcaaacgacgggcctaactctattattttgaaatccttcataacgccatgtgaatgccaacagggtataatatttttagcccggtcacgtcagtccatcgcatccgactctcccgaaaactatatggatttccgcgtattccgtataggtacaattgtacaattgtacaacatgcaattgtacaccgtcagcagcactaaagtggaaaaagcagccgataggcagatcagccaggggcagatcccagcggagatgctgcaccgctgctgattgactgaaccagaccgagataaattaagatagctgttgtctcagatgcactccttacatggtcaattagcggcccaaccacgtcgccgcagatggggcctttggagtcaacaatggttaacatggctaacacggccgacatttgcaggacaataagattggtcaagtcgacggtcaaagtcaaattgattcggctcaaacctggaaggtcaatcgccaaattagctgaatcgatagatcggctacaggcaaagcgcggcgccacccgaactgagagccctggagtctgctgctgctgctgctggggggtttttggttcaccgcgaactggcgacgtgagtataaatgacggtgaatttgctcagaagggatgatctgacagctcactcgaattgaaaatgcagatcccagtgtgttgttcaacttaaaggaagcaaaaatcagaaattaaaaaaaacaatagtcccatcgagggcccgcaataacatgtcgtttcatggttggaatctccaatactatccacaccagggacaattaagccacagtatggagacatgaggatattctctctctctctttggtccgtgccagtgatgctagtccaagtcaatccaagctaatccaagttagtccaagttcgtccttgctagatcggctaattccacgatcggtggaggcaaagtagatagctcagcttcgatatacgatcgcgtggcttgtaattttattatcctctcagattccttgaattcatgctggggctccctcagctgtaaactcaaatatgaaagccctgttccattcatccttacgcgttttggtttatatgtaggggaggcttagggttgtctccgttggtcctttttttcttcttcctccttaccctacaatgtgtccctgaccgacgtcaattaattctcttttttatttttaattattaatatttgtctattccttttgtctgtattaatttcacgcgccgtgtgactgacaccgcgggatatgtgaaaggcgtgcaggccttagaatacccaaggacatttgcatttcgcttcagaaactggagtcaagatgcggtggtcttttatattcgtcttaatagtgtccctgtttctactagggacattggcagcgccagcttcgcccgcgggacgacgcaatgttgcattcgccaacttggaggtcagacaggaaaaggaaacggattctacaaagacagatgctgccagtgagactacgacggcaacacaaacagatacatcaaaaacaacaaccgaggcatcaacatctgtcgaaactacaacgacaggcgctactacctcgagtactgactcgactactacaacgcatgcgacaacgcatgccacaacaacgacttctgccgcttctgctacctccactgtaccttcgctcgacggagcaactgaatcttctcaacaggaagcagcagactccagtaggccgacctactccggtggtctgccaatcaaaccagtgatcacgccggcatggggtgttgggggagttatacttattgccctcggggctgttctggctttcattggtgtccggcaacaatggtatttaagctacgattctttgatgacaatagcattttctaacaaagaaaagggtccaaatcttcctctcaaccggatttcttagcgcattgggagttaccgtaagttctatactcgaaaatagcaaagagcaaaaactaaccaactcgcatacaggtccttattatctatgtgatgagcccaccggtcagcaatgctgtacagggcggttacctcgtcgctgtcttcttcaccggcgttgtgttcggtgctttatcgctcgtcttcagagagatatgcgagggactgggctgtcttctgggcggtttctgcctgagcatgtggttccttgccttgaaatccggcggccttgtaaccgaaagtggctccagggtcggtatgatcattgcctttactgtaggtttctactgcctgtcattcagccattatacccgatcatacgggttgatcggttgcacatcattcgccggtgcaactgccttagtccttggaatcgattgctttagcagagctgggttgaaggagttctggttatacaactggagtaagtctaacaatttttcccaactgttgatagttgctgacagacccagacttgaaccaaaatgtcttccctcttaacacggacacttaccccgtgacacgtggtattcgtgttgagctcgccgtgactatcattatcgctgttctaggagtaatctcccagatcagactttggaatctcatcaaggagcgcagaaccaaggaagaagaatcccgcctggaacacactcgaaagatcgaagaagaagatctcgaaatcggtcgccgactcgaggagaagaatatccaagaacgtgctgaatgggaactcatttacggaaccggcaaagccgccgatggcaaaaccgcctcggtttcggagactgctgttgatgactcgcgacggggctcggaggcgtttgagtcctctgacaacgacagggagggtgagatcgagctcaaggaaatctcgagccccgatgcttccggtagtggttctgatggagagaagaaccgccagggtgaaaacggtactcgcgaacttgaggctgtgcctgaggaggattcatcccaacagggtcaatcacaagatgcagaggaaaagggcgtcgagcaagagggtcgatctgaagaaaaggtgccgagacctaccacacctgttatgactcatatccttggtgagggcaatgatgagtcctctgagatcggtgctgagatcggctcagaggtcggcacgccgcgctcgaaacggttctccggcagagaaatgttgaaccggatgtcttggcggctcagcaatggtgttatgacgacttcacagtcgcaggagaatctggtggctcatgatgatgccagctcttctgtcctgggggttgtggatgatctccatgagatgagcgtcggctgtccgagtgttctatcggatgcggatgttcacgagcaaacgcgcgaaattagagccgagttatctccagagaaggactcggcaggtgtggacatcaagtcaaaatccggctcacaagccatccaagatgctggactccatgtcgatacagccatatcccaggatgccgagaaagtgaccaccgaagaagtcgatactagcgacactgttcagcaggtgtctcccgtcgagagcactgttattgccaacagtccccttgagaattctggaatttccgaagtgtcggagaagccacaatcgccagaaacccccgcaacagatgttcaagcagacattccagatgcctcaaagaagatcggggaagtcaagcccaaacctacattggagcagtcacctatgaatgatgcagaagtggaaaatgtggaggccaatgaagatcaacctcctactgctaaaaccatcaaggccgagtctattcctaagtcgaaggctgcatctttgcccgagcccaaggttgagccaaagatcaaagtaatcaaaaaactagatgcgtcaagcatcaagcacatccccgagcaaacatcacgagtgatccattcgtaccggacgaacgaatgggccaagcatctcgcagatgcggacacccctgagatggagccgcttgagttcgaacctgaacccgaggcagaagcctcagaggaagttcgcgagactgcagcatttgtcgatgtaggcggtcttctccagacgcctcttactgcacaaccaccaccaatcgtgaacagacctgaatttgatgatatggacaatcaacaaccatacatctcatcgacaccctcaccagatattccccgatcaaagacacggacaggcacgcaaggtctcagcaaagcgaatccaagtctaacccggaacgattcgacagcttcggtcaatatgctaccatcagcttttaatcctttcataacccaagaaccgggattgacgtcgatgcgctgcgcatcgactcccctgttgacagtcactactcccaacgagcccaaagaagcagagccatcatcacgctggaacgggccacctccccttctcgcaatccgcgagaacatggtccgaaaccgcatgtcctcaacatccaaccgcttcgatccctgggccgcacgcaacttatcccgacagtctctacctgatatggcacccctcgtctccccagtagcaccagtatcaccgccgctctccatcccggaagaaaaggagatagaacccgaacccaacgaggatgacatcccactttccaaacggcgcgccctgctacagcgccagacaatgcggtcttcatctgcattaagcattgagaatctccaggctgcccagtcccctatgtatcccccggcagaacccgccggcgagctgaagcggtctgcttcaagaatggcagcgtggcgacaatcggtccgcgaggaaatcacccaaaagcgaaatcctttggccatgcagtccccgcccctcagcccagctggtccccccgaccaacggcgcacatggagctctgtgcagcagatgcgcgaggcttcgtctgctcagctgggcaatgccatcgcagacggcatgcagcgtggcaacatgacggatctgcaccgacaggcaatgcgacgtatgcaggcctcagcaaatcgaaagctgtagtacctatggttcattcatttttctcaataccccttgatttggttcttttttaccaagcgttgttattacacgccatggcgaatgtgtgtttcctacgactttatgaagtatttattgcatcaatgtctataatcttatttgataatgtatatctttgcccaattcgcgccatgcaagtaatacggcctcaccgagcactgccgagacttggtctgaattgaaatgcagttcgtcatatcgcagtgcatggtgactactagggttcctattggcttttaaggggaatcggtcgtagcctatagaataggatgaagactatgactctacggagtaataagtcggaagatcttatggccaatttccgttggtaataagagctaagaggaccaaagtccctaacggtccttatgcactgcgatagtcatccctaatagtgcaatagtacgtctattagcgtttgctagagtgtgcatactaccaataaaggccgagatgaaacaagggacggtggattcatcacagtgaaaccgggggcaaacgacttgcatatcaattattatattattggacgtatatccctttcgagtctctgtcattttgatataagatataagatgcaagatccttcttcaagtctgaattccggtttctgtctatttagccagagtcgagactcatatacgccaagctagctgcttctataagatttacaaggattttgtctcaaatttcacctacaaattcaaaccttctttcttttccctaattcttttctaatatcatttctcacactcattttgctgtatgtccacatagggcactgttctcttggccgatctccatctccgctccagtttcccccctctcctttctcccctcaaaacggcgtccttaatagtccccagacctctgtcgagggaggaagaagcatactgttacccacgtggccaacaattcataaaccggcctccaaccaatcgcgcctccgtggagtcaactccgtcattcgttcgcgcccagcggcgacagtgcgttccgatctcaggcccgccgtcgctcctccgcccaccagcagtccgactcgcaaacccagtcaaccacgtcccacgaataacccccataaccgtccgcccccaacaatccgacgagagtctcccactcagcttcgaccactcacgcgacgtccaccccctcctcagcgtcccagagcgacgccgctcccgcctaagcccatccccgaacagcctactcgtcgagcgcagccagggggaaacagaaagtggccggacgagcattgccctgccccgacgacaccgtcgcagcgaagagttcacagaaatgacggccgcgttcgcgggcagcgcagcgcgcgaaacagagaacctgcgccctcccgaagctgtccacctcacacagagcggcacccgacagaacgaccgtttccgctacacccagtcacaaacttccttccactcccagtcccagtcccagtcccagatcgcttccgtcccgtcgcatactgggtacccgcatgccgatgtcgctgaggagctcgcctggggccctgctcacccctgttttccgcatattaatccccatgtgcctctcgggtcgcgggagtacctcacaacgcgcgtgattcgcatccggcgagattggatgatcaagggtgatttggcgccgacattttcgaatttgtatcccgagatccttgatccgttgttgtcggagcaggagtttcgccgggttatctctaccgtcaatgatggtgttatcaaggcgtttgatccgttcagttttcggaattggttcgatagcacgatgggtttgttgacgggctgggtatgggatgatatcaatgcccccgcgaccaaaagccagttgcagcgtgtcgaggcttggttggagaattggaaccgcgaggtcggtgccaaagatggtgttcatatctggagcttgaggcggacggcctatatgtcgcttgatatccagattcccgatcccaaggttggcattgtacccagtgaagccccttcagctgctaataccaggccgagtactggtattggggctggctcttgatggtgtcgggctgcaggcgccgttttgcttttgctttctgattgtacatctttgtgatttgttcctttactgggatctctgcatgatatccatcccgcgcgacactgaatctttcgctatatacctttcgtctttggagtccgaggttttccttttaatatttctgtgatctgatccctttctttcatatctcttctgtcagcttcatctacatatccctgattcccctggggggctactttaccctgatttcgaactgtcatcttgaccatacatctttgtccatatccggctgtcatactgcattgtcacctctagacttgctaatcctgagaaagaactaactacattgcggatttctctccgccttaatgctccctccacgttgatgttcaataggagtagagcagcccatggtccatacaatactcgtacattgagcgtttatgcaagtcagtgttcgctttgcctgcaaaacattctatggtaggttcatgcaccatcgtgatacttcatacattaggcaaaaatatcacactacaaacaagcatatcttcaagctcaaacccaattacagtccaatattcctaaattgtcgacaccgaggatagcagaaaagatccctccttcctagactcaacgcttacctcttcagccaactaaaaatgggtgattgagaagcccagtaattgattcccgatcttccggacgttcctgcaacgtcgaccaaagaaaatctgcaagcttctcagtattgtctttaccaaaatcagccggtaatctctcgctaatgtaaatggcaaatttttcattgccgtactcaaataggctgcgcatgagagacctcaaattcccatgaacctcgtcaatcgtgcagccaaaatattctaccgggaagagtggctcgtttgtagcaagctgaaatatctgcacttgatggttagatcatggtaggagttaaggatgggatagattaccaaacaccctagagcccatatgtccaccttttcattccacgaatggggttgaattaactcgggtgccctcgacgccattggcgtgacaggaagaatatcatgatgtatgttccatatagctatggtaatagtcaataatcgacattctcgcatcactaaaagggttcagacctccgcccatatcaccaatcttgactataagtgtcgagaaggccgcatcgtctagcattccacggggccgctgcgagctcataagataccgcggagcactgtcatccacttcaactcctggaagccaattgacatgactaaattcgggttcttctatcatttcgctcgataagttgcagttcagggtgaacaggatattggctggttggaggtctgttcataaatcaatattatcgtcttggtcatttagtcccgaggatacataccgccatgaataaggccctggtcgtgaagataattcaacccgagcaatatctgtttcgaaacctcacgaacataacctgggcagcgtggtttttcccgaacagtcattgctccaccatctgatatcatgactgggaacacgagacaaatatgtaagccattaggccctttgtgctcaaagtgatctaatagttgcaaaacgtggtttctccctggatggtgtgtatctactttcgataagtgaaggaggatagaacgttctcggctgctacttgggatatccgctttgagaatcttcaacgtaatatatcttccaagcctaggcacaggaaggagtaagcttgatagtcgcgggcaaaatagaaaaatgaggtgaatacaaccttgtatcttccgcaatccaaactgtggaaaactggccgaatgcccattttgcaacaatccgatacctgtggtggaaagtgtcctcgaggtgaactgggtggtagcctccgatacgatactcttcaataggttcgacaacattgtgaatgcgttcgaagcgacgcattttcctcaatataatttattcgtacaaggcacgtctgtgtcgctgggaaaacgtcggtgtggaaagcaaggaatcaatttgatatctacataatcagcagcaaataggaggcacgagaggtgggtaaccctagggcacccaatcaacttgtagctcgtacatggcactttcattataaacagcagaagcacaactgaatttccccagtaaagaaatgtgtcactagtctaaggtagtctcttcaaggcttcctggcccttctcattcaaatccggatactgccttagattacacaaatccctccaaaatgccttaatgccttggcatcttcatgtccctcgtcatgtacgcctaagcgctcttgcaacaactttttccattcgacatccataactgtaaatccgaaagaggctgcgacatattcataccagataggaagataggcagcgtactcccagtcgagtatattaacgacctttccatcctggatcatgatgttgcccaaattgagatcgcaatgagtgaggacatacggctcgcatttcggtcggcgcttctttaagttatccaacactttgagcggtagatggtgaaggtcaaggctaagagcatcccagagttcttggtcggagtgaaacggcccatgcggttcaagattgaagaatagtaaagtgggaataacatgggctatgatcgacacattcgatggagggtgatatgacagatcgaagctgcttacgcacttcaacaacttgatccgcaatagccactttttggggcttcgataacgaaggccatgcctcctcaagtgtttggccgcttatgcgttcggtcataacaaagtatcggccatcgtgatcgacccaatcgcgcagaacctttggaactgggatatcggtatgggttgccaggtaattcaagattttgacttcaacttttgcttttagaccctcatccgggcggtctttcaaaatcacatcagaaccgatggtccaaacgccccgttgagatgcaccgtagaaaagtttaaggtggctagagtaatggcactgtttttgtttggtggatgtccagccgcacgcaatgcaggcctcgacgaatgtttcacccattagagttggaggttcaacgggggtgatttgttataggtggaatttgatcgaggatgggagatggaagagggaccgatttttcaaaagcgaaggccttcctatgaagtaatcaacaccgtttctaaggctcaactttgagataatcgaggtcttgaaaaaagaaaataattggtggaagccgtgggcatggccgtcaaggccgattttgctattaagattcgctctgcccacgcgtatctatttcactggtttctaagcctcgtcgaaaccaaaagagcggatcagtatgtaggcagttttgagaatggaatcagactattcattgatgcagtacaggctgaaagttggttccagtagaggtttcgtgcgttccctaatgagcagcaaaccgaagtttttagatggcagaggaacagttacctatgtctctctccccttacatatgaaatagccattaactagttagttatagtgagctggttagttatcgctaactatataggtagttatggttgtcaagtagttacacaagtagtcaagtaagtggcacctccttttatacctcgggcggtgtcgatccaccccacccctgtttccgcagctctccaactcctatcaggagcagcaactcgactcactaaaacattatgctctcggggatcctcatatttaaccagaagggcgaaaacctcatttttcgcgccttccgtagcgattgccgcccgcgtttagccgacatcttccgcatccaagtcatctccaatccccaggtgcgctcgccgatcctgaccttgggctcgacgacctttagccatgtcaagcacgagaacatctacttggtagctgtgaccaagagcaatgccaatgccgcgctgattttcgagttcctctaccggctggtcatgctgggcaagagctatttcgggaagctcgatgaggaggccgtgaagaacaacttcgtcctgatttacgaactgctcgatggtatgtggaaaaggctcaatgttctagaaacggagcctaacaattggtgatacagaaattctcgacttcggatacccccagaacaccgatccagataccctgaaaatgtacatcacaaccgaaggcgtcaaatcggccatcaccaactccccatcagactccgcccgaattacccaacaagcaacaggcgcgctctcctggcgccgctccgacataaaataccgcaaaaacgaagccttcgtcgacgtaatcgaagatgtcaacctcctgatgtccgccacaggcaccgtcctccgcgccgacgtcaacggccagatcgtcatgcgcgcctacctgaccggcaccccagaatgcaaattcggcctgaacgaccgcctcctcctagacaccggtgagacctctagcaacatgaacaacccaggcggcggcaacggagtcagcacctcaaagacaacgcgcgccgcggcaggctccgtcacgctggaagactgccagttccaccagtgcgtgaagctgggccgatttgacgcggaccgcatcatctccttcgtgccgccggatggcgagttcgagctgatgcgctaccgcgccaccgagaacgtcaacctgcccttcaaggtgcacccgattgtgcgcgagatcggtaccacaaaggtcgagtacagcgtcgccatcaaggcgaactacagctccaagctcttcgctacgaatgtggttattcgtatccccacgccgcttaatactgccaagactacggagcgcacgagccagggccgcgccaagtatgaaccagagcagaacaatatcgtctggaagattgcccgcttctccggacagtcggagtatgtgcttaatgctgaggcaacgcttacgactatgacgcaccagaaggcttggagtcgtccgccgttgagtctttcgtttagtttgcttatgtttacctcttcgggtctgctggtgcgctatcttaaggtctttgagaagagtaattacagctctgtcaagtgggtgcgctatatgactcgcgcagggagttatgagattcggtatgtgtttatcttttcgctggtcatggttttggtcgctgactcaactgcttcattaggttctgatgattctcgaaattttgtgctgattttgggttcgtgtgggagaggattccaacgagcagtgttgatatcattggacttgagtccagtttcatcttgttatttttactttgcgcagcacattggtgtctggcgttggatggagccatatacatactggattttttaacacgtatccaattcttcatttcccgtaccttagatatatgcttgtaggagtttgaggttgagtaccatggcaaaggtttgaattgtgtaattgcatgttttcacttggctttaggtatatccatcccaaatcttagatacgatgagacgattgtcacaatagcatgcatgaagcaattgtcaaatctgtagttactatcttatacttgttcgagtgatagacaatgaaaatataagtaaagttggtagtagtagatagtagtacaattcccaaacaaacgacagtagatgtggaagaataagtcacacaaaaacaacagtatgagcaagaaaagaagcaggaacatattcacatagcccgagtagaacggaactcacagcaccggacaagcagacgaaagcaatttgtgctggtcaatagacaacagaccgaaaagaaaaatgataatacagttggtgttccggcaaagaaatcaagccaagtcaggccaataggaataaggtcggtcacaggtggtacagagatcatataatacattaagaaagacaataataattgcagtaagcaatattcaatattcaacgccgactcgagcgcaggccgatacgaccctcaccaacgagggactgccatctgggcccaacgtggctgcggcccatttggcgcgcgcactcgtcccagtcttgttgggagaggcggaatttcccgaggaccagctcgagaagatgttggtcttcttcggcggtccagtcttgtggagccgaaggagcacactcgtctgttacctcgatggagggcagaggcgcgtctgggtcgacgcatggaccagctgggatgtcatagtccatctggcgacgaggaggagagggaggagattgggtgacaggaggagaatgtagggagtaaaagtctgtggaggaaaggccaagaggcatatcggaggggacgtgacggcggcgtttgggagtcgcgaagcggttgcgccggcgagtcatctccgcgtcgctgtcatcgccatcgagnnnnnnnnnnnnnnnnnnnnnnnnnnnnnnnnnnnnnnnnnnnnnnnnnnnnnnnnnnnnnnnnnnnnnnnnnnnnnnnnnnnnnnnnnnnnnnnnnnnnnnnnggggggcggggttgtgggcgggcgcggcgggcgggtgcggatggaggaggagggggtgtgagagcggcagttctgggtggtggtgtttgtctaggggagaccgggcgtgcggccttgtgcgatcgcggcgagcgacggggtgtgttgagggggagggggctctggaggcgttgagatttcacagatcgcgatgaaggtgtgggcgatcggttgagtagagattgtagtgcgcggcaggtgccaagaagaccgttgcccgatgcaaatcctgtgccggatgggggaggagttgagaataggcggctgggagtgaagcgagacgactggcgcacatcgcatgggagggcggatgggagaagcatgattgtagatataaattgaatgcgcggtttgagtggtttgaagttggtttgaagatgaatgggatcaaagagagtcaacgtcgagttgttgcgcggtcgcgcgatttgtgggtaggctgtgattgcgccggaggcggttgcgctgcgcgacgaggcagttggggatgcgaaaatgaatggacgatattgttgttggaatgcgcttcaagttccaccttttccgggagatgcgacagcaatttggtgatatggatgttttgacagtgagtgtgtagggagaagaagttggagggggaatgcggcgataaaaagaaaattggggccgcaaacggtcaagcgaatgatctcccgtgcaacgtcaagtttatttccggccacaaagaatgtgttcgatctattattgacttcaacaagctcaaaggaactatgaaacagttgaaacagttggcagagttgattggaaaaagaagggaatgtgagagacagatctcagggtcaacgaaagtgatgaaggagctgaaggagctaatgggaggagctgatggtaagaatactaggaacaggaatgaaggcctctctattatactatctacttgaaggacctgaaggacttgacattgtagaccagtgaaacagtatactaaggagtctaggacaagagggattacatgcaaggcgcatacaaagaggactacaggcacgaggcacccctgagacactttttccaattacacttcctatttaggcaacagatcgactctgtgcacgattttctttgaatttgtatagtatgatcagattgtattggtgtattgcaatgaagtcagagcctgtaacatcaatggcttagggctgtataccaagtatccaagtacagccctggttagacgcgatcataccatttctttgatttcctgatctcatcattgccaccgggggaagtcgcgttttaataatgatctgaaagaggaggttcccttcctactattctcctacttctcctacccttcaccaggagatttgttccctgccatgccagccctctaggactctaggactatagggcctctgaacactgccacttgtgtgatcctactcatagaccttgtaaatagcttagtggcatagtggagtggaatggtggcttcataattttcagcgcgttgacgcgtctcgcgtttctcgtgacgcgacgcgacgcgccaagactcatacgtgccctaacggcgtccatactgtatagaggttatagtgaatattactacggagtacagcatgtatgtgaatacacggaccactacggagtactcgtgggtcaatgcttagaatgccatgtgccctataggatcaaccagggtcatcccactcgggggattttctatactgtactgtaagaaattccattgcccttgcttctccttaccgggtttactctggtcaactcgtgcaaagatacagcttgcattatcttgcagagctctgcatctaccacattgtggggtgcagactggctgcacactgcgggccgacaagcattctacagatagacttattgcgatacaagcagttggtaaaggatattccagttgtgcctatcgaaaagggcgttgtgtctactccttgtaacccagcttgactagaagggctgacagcgccactagacctgtgatcattcaaagggactcagtacaataccgagtggagagccttcgaaatgttccgcagcctccattccaagacccgtgccccagccactgatcaaaatccaatctcatgcaaggggtagcccgaggatgaaactgcttccaccgagaatcattcatgagcacaaggctaggcttcggtaacatagggtataggagatacagagtccagcgcaacgttagaataaacacaaagcctataatagacgagcgtttctaatttccaacgctttcgtctcctaactatccatggatcgatgctatctaagcttctcctgcagtggatcctgcggcgctaatgcaagacatacgccccttcccacgggcctcgatgtcgatcgtctccacattccttcaatcggcaagccctaatgtggctgggactgtacttgccatagggcaagatactgaggtctcacacgttcacctttacggcctcatcgcctcagacatcgctcaatatggtagtgctcttgccccatcatcccctccctgtcttactttgtgggccaaagatgtgtggtttggctggcgatcaccccctaagatccgggtcttctaccgtacatcattgattatcttttctttttgttgagaatactattacagctgacaggaagttgtgattgggtctagggactgtgttctacggcctcgtctcagagaggctgtagtaccctaccgaggctcataacacttgagtcaacctcccaatcgcctgaccaccaattggcctgaaagtgagaccatctctccgggcttgctaccgatcagcactccctatttctgtatcgaggtctacccctcttctctacccccctgccctactgctagtgctctcatagtcacacgataagggccagggataagaataaagaggctacccaagtagaagtgggctcattacaccagaccctggcttcatagcgcccaatggacggtggaagccctcctccctatccttatccgtgtggtcccaggaagagctattgttagctcccctcgctccctcctgtcctctgtgggtttgtatgcccgaaggatcgcgaactattgcaatttgcctgtgtaacttgcttcctagggatggtcattgggtgacgatgaagtaacttatcgctttgcgtggattctccccgatgatactggttccaggttctcaaactcttaataatcttccgtacttgcttccaagtagagaacttctaggctcattgctaggaatattggcggtgggaaagaaatgctaacgataattattttcttcgccccatggcgaacatagagccaatatctacttgggaatggaatgttcatggcaatagtcacaccgtcaaaacttcaatgctcaaagggtatccaatatagcctcattgaccttgcattctcttaaaacgctcctccgcagccctcgctctgcgctctctctccaatcgcatcctcatctcaggcgtcatacctctagtctcttcatctctcctttcggctgcagacttctcaacggcgcccacagtacgaccgccagacttagtcgttctcggcttcgccgccttctcggcctcttcgcgttgtaggcgatccaagctagccttgcgccgggtagattcttcctcctcggctattttacgttctttctcggcccggctctcagcgtcggctttagagaccgccgatggaaccttggctacttcccagtcccattttgactcgccgagatcgtgacgggcaatgcggaaggcgtcgcgcgtggctcgatcgccggtgagttcgaatggagttctgccttcgttgttaactgccgttggatcagacccggcttttgtgaggagagccgtaactacggctggtgcgtcgaggtttgcggcgaggtgaaggagtgtagggcaacggaagttttgtggcgagtcggcgggcgtaaaggtgaaagaagaaggtatagagttgtttgagatataggacatgagggcgggaacctttgagcggcgaatgagcgcctgcagttgggatgtgtgcaacaaggcagcttcctcttctttcgagagcttcggcttctgtggttgcggtttttggacgtgtgtagatgattttgactcctgctctcgccgcttggcttcagccgcagccagtgcggcttcgtccacctcgctgaccttcattctggtcaactccttgaaggaccgcataagttccccttgagtcgcacggcgagtattgaacgggaaccctcgtaatcgggggtcgttctgcctgaggacctgtccgtcatattgaccgaaaagagtcttgcgatttgtctttccggtagctcggacgaacaacagctcggctgtgtcaatcatatctttccactccgacaacacatctctgatatccttctcaagtgcagcctcgttgtaccggcgcagacttgaacctgccgaatgggcagcacgacccgacgcgtcactggcagactgtgagccaccctgctttcgccgtgtcgtgtatcggtggaacgttttgtgcgcaataacccgagcctgcctgtcttcaactcctccttgctttcggtgaatctccggtgccagcgaaaccaacatagccgcgaagtggccaccgccgatcatgcacatgaaaatatgcgggcccgaagcagcggggtcttggacgttacttgccttattggtgcgcgctttgactggcgcaagctgcttccgtcggagtgtatcaaccaggtgagcgggctcgtcctgctcggcatttgagaaaatggccctgtagacgcctagggacttgtttgatggtaatcccgagctagacagccagaatatggggtgctttggagcgattggtgtctcagtcgcttccggatcctcgttcgggtgagacagcttggcctgcttcttcagcaaggcggacagcgttgtgcccgcggccccctctgcatcatcctcctctgtctccgaagactcagaaccagatatagactcatctaactctccaatcgccttcgcgaattcgatctcttccagaggcgcattcccgcgcagctgggctttgatgttataccggtgatggtccgagcggacatggctgcgctgttcctgtacactgttgtaagagaccctgcagagggagcataggttggaggttgcgatcgcagagtcctgtgcagctagttcgaggtctatcggagagggttcgggttcttgttcggcgacaggttgactggtcttggccgttaagcttgcaagaagttctggcggcagatcgtagactggaaagatcagcgaaatgaatcaacgaccatatagggcttcggaggcgtaccataaagaggccttttcaggagctcctccatttgagtcgtatcgaccatgatgggctggacgaagaatgtgtattgagatcgtggtgcccctccaatgacgctgttaagtgggctcttaccgcctaggagcaatgcagtactatgtggactctatgcgcttcgctcgcttttatgaaaagatgctggatctgcaataattttgagtcatgttgtggagctttgctcagcctcatttaggtccctgagagcgttcattttccatattaattccaggcttgtgggctgtgctcgcagatattaacgagtcggcctcccgattaggaaatcaaacccatggacatagtcatatcctcggtattatgtttgatacctttgtagggcatgattatgccgatgattctgattcttttccctaaccctatctcaatctatgttatgcaatcttttcttttctagtacctgtcgtcatcacgtgattttcgaatgccgtttcagaatcacctcgatcaatggcctattagccttattagtacacaaattcagtccatcaccgtttttttgcctgttctgtaggatgtccgacttacatgctttgcaggtcgatttgttccttttggtaaattctctctgcttgttatggtacatgcatattttaacaacattcaagggaaaatggcaagatgactcgtcgctatcgactgatagccaacgaaaacccttggcccctgttttatccagactaccacatacagctaatcataaaccgcatccacatcgttgataaaacagcgcttgcttccgagggccccgacacagggaaggttcttgtggtgtttgttgacaagggcggacgggcaatccactattctcgcctagagctaaaggatgcagcggatattgcatatctcttgaatttcatgcttcaagaacatgggtgttgggtcaatgcgcagattggccaatcctatgaatggggggcgcccttgagaccccctatggcgagaatggtgtgaggtgaagatacccaagcttcacttcacttcagtaagtctcggaaactagtcacactccttgaataccagagttaccagggccgggtaataagaaaggtgagtctccggtgatagtagtctaaacggagacctcaagatgcaacgtggaaagcggattgaaattggaggtgtggcgaagtcataatctaggcactggaaacccatggataacatcagcaatacctaagggtagctcctacacgggttggcatgaccaacgtctcttggccaatggcatatcgggaagtgtccctaggagctgtgatatgaggaagccaaaagtcttgataagtaatcaactgatcctctacccacagacgccaacgaccaatttgcaggcccgcagaactcgagtcgtggattgaagtgagtcttgtgtaagaagggtctatctccaagatagttcttcctgcaataccttgctcctggcttgatgcctgtcgactcgtacgtgtatagcccaagattattccattcccaccggaaccaggaacaatatttgctatcttttgtgcgagctcttgggcacgtttttgatatctgaatttggtggaaatgccaaagtactgtcggtcccaatctgtagtgaagggtgtgaggacgaagactttgggcgcgtagattgcattcaagacgccggggttatggtcggtcccaatcagagcagttatagattgtgcatataatgtcccatctcggagggacttggatgcattcatcgtgaacgagtcgtcgtcggttggattgaaagctaggtcaacgaacacagggctttcccaaatgtgcgaaaggtacacacccttttcggatgctataatcaccactgtacatccgtaaatgccctttactcctacagccgagtgaccaattgatggatagttaaaccattgtgcagacactggtccaggctggtcaatccaaattggcgccaagctcttgacatagctgctgtaaggaggagaagcgtcctgggaagcatatgcaatcaacgaactgatcatcattttctcatcttggctgctagagagagttgtcttggagacaggccgtgtcggacttgcagctccactagttgtagcaatctcacaaccctcggctggtagaatagtggtaatatccgttgggatcgactcataatgctcaatcatggccgccactcccatgctagcactacccagaaggcttgttctcatagagctcaacttttcgcaagtatcgggagggcataatactggagtatcacttgtcgaggtactggaaaatgtggttgctgacccagcgacagagtattcaatagtggtagcggtagttgaaggtaagcaggttgttgttgaaacagtggaattggtgtcagaagctaatggtttgagcatcatccgtatcgatgccatctgaaacgaactccaacggcacgtccaggcgggacgatattgctgcatctgagtttttgatagaggatgtttctcacccaccgtagtggtgtatagcattcctcgactgcagcaatatcgtaaagctaagacagagaaatctgtggacttgctacccaggctaggtgggtagtggtattgtggcggaagcaatattcccagtgttggtacttgctgatgagatctcactcgataatgaagcaatggttttgctattacttttcgagcaatgtgaatttttgcattgaatatcttcggttctgacagaaggagtggcagagtagagaaaggtgtgcatctcatgtcactgatacccaaggtggtaattatctggggactacgctattatattgaaagagctatatgcagagttcctattgaagacaatgacaataaagtttgtttgcttgggcttacatacaataggattgtgatcattgtcataaagcacccacttcctatcacttagaggctaataggctttacactttgggttataaacagttcatctaatttaagggtgtattatttgaatcaagaaagaagggtttctgtctaattcgtaggcctgtcttcctggtaagatcttggtcctaaggataacctcgaatacggagtagaataatgctgacaagtatattcatcaactgactgcgaatttagtgtaatagggtcaattgatttagactgaagcttgaattgagcagcgcctattagtgtgttaattctcaagacacgtacatcgcctagttagccgcttgatgtttgtctcgagtctcgacgcatattcaaacccgttcatcacatgactaacatcacaaggcccatgcgtctctttggcaaacagccgccctcgtcaagctctcatcttagacaaaacccaatatacagaaacgagaatttaccatctctgtgggaaacatgtcttcaaaacaacagcgtcaacagcagctaatgctaaatgcacgccaatgtcagatgcagatgatggctgctaagcaacaaccaagcaccggctgcaacagtggcaatcctctacagcagcaaatgcagcctcgatcagggacaatggggtccaaatatgatgacctacccatactggagcccactgatgttatctttatttctgaagatcctaagtcgactggtctagttcccgccttcttcggatcttttgaatccgcctgccagcacggcaccctctccaccattcagtccattgtctcatccaagaacctcacacctgcttttctccatcatggtcttacacgtgctctacgctccggaaatattgagattgctcgctatctcctagatagtggcgcaccaatagttcgcgaaactccaagcaatatcttctttgtacctttggaacagcaaattgccctctttgagctctttacccagtataattggactcccaatacaccaggctactatggtagtgtcctgctccctcgaattatcaagaacacccctcttcttcgttggttcctcgaccacggagccaatcccaaccttggggtgcagcagaccacccatgacaggtgtggtgggccagatacttcctcgtgtgctgcacttgaggcagctgcagctactggaggagttgaggctgtgcgtatgattttagatgcgggtgctaacatccaaaacggtgtaccactacactacgccgccggggcttgtcctcccggtacgaatccacatgctgggaaagtggtaccaagccgtgaatttgatactagcagaattccagtgatggcactactagtcggtcgcggggctgatgtaaatcagagagaagagtcacgacacatggtcgcgcagtatgcgattgtatatgcggcgatggcaggagcagttgagcgggtcaagtggttgttggagcatggagcagatccatatataaaagggaactggggcagtgcagctgagtatgcacttacctcggggaatgaagagataacaaaggtcattggggaatttaccctaaaaaaagcttgaattctgcagttttgatatagcatcaatgaggaaatatattgtgctatcatgtttcgaaaaattggttatttgtcgaagaaaggatacgaaaccattaatataaaatatacaataaacacatcaattttgatgatttgaattagcgaccagctttatatgctgtaaacagtcctttgaagccatcacaccttcctaagttggaagacaaccccgataagccgaaatagccgcatcggtattagtgcgcttatccccgaggattacatcattccaggtcacgtgtgaggtctgcaaaatttgtatccaggaatgaagcgtctaggaagatatacggagtagtcaattttatgttacgcaagtttcatacaaggactccagagaaccctgcatgtgtacattacggtgtaatccatgagttcgactccataggctctaatgcgcacggtaaccagccccgattttccccattctgaagtggagcgctgcccgttcttgcttttgtaagcagcctagcttggaccaacacccccgttttcttctagttctccaacttcgtatcttttcttgcttgtgcatagaaaggcataccgagccactaagaaaaaaaatgctggatggccaatcccaggcggtcctagaggcgtcccgcccggggcatctcttgcattcccttggatcggcacttgattcgcggcgacagcctttctgcacagatagcgagggctggggcccgctcagctcatcgagattcgacctgacaccatgctttcttgacgtgattgtggcgatagtggcagtttggggtacactgagtggactagcagcgttgtggttattattgtggaagcgggttccgcagcccgtatcgaagaattggcacttctacaccaagttggttagtacatatcggacacgcgcgcacacttgtggacgttaatttactgactggtgtttttgtcatcctaggctgttcttgccgctctcatcattgttaccgcccttcaagctgcgattcaagtcgaatcagaacccaaaatcttctgggccgattttcgcttctggtcctccatcctgaccatcatctcgctgggggtgataacttcagtgcaatattttgaacattggcggagtagacagcccaatggggtcgtcctattttactggcttttcttcatcatcgcctacgcggtcaaactccggtccctgattgcgcgcaaagaatacatcgaccaactcccttactttgtctgcttcaatgttagcttgggactggcactctttgaatttgtgcttgaatatttcgtacccaagaagcaaagcgcatacgatgcgctgggagatgaggatgagtgcccctacaattatgccgatgttttctcggttcttacctttggttggatgacaccgatgatgaaatatggatataagaactacttgactcaagatgacctctggaatctccgcagtcgcgataccaccagagccacgggcaatgccctgcaggaggcatgggatgaacagctcaagaaaaaggagccgtctttgtggacagcactcttcaaggctttcggcgcaccctatgtgcgtggtgcgataatcaaatccggaagcgatgttcttgcctttgtgcaaccacaactcctacgacttctcattgccttcattgagtcgtatcgaagcccggacccgcagcctgttatcaggggtgtcgccatcgccttggccatgtttgttgtttctgtctgccagacgagtttcctccatcaatatttccagcgcgctttcgacactggcatgagagtcaaatcagcgttgactgctatgatttatgccaagtctctgaaattatcaaatgaagggcgctcggaaaagaccaccggtgatattgtcaaccacatggcagttgatcagcagcgccttgcagatttgacccagttcggtactcagcttatctctgcgcctttccaaattactctgtgcatggtctccctttaccaacttcttggcccgagcatgtttgccggtattggagtcatgattctcatgattcccctgaatggtgtcattgctcgaatgatgaagaagttacagatcatccaaatgaagaacaaggactcgaggacccgattgatgactgagattctgaataatatcaagagtatcaagctctacgcctggaacacagctttcatgaacaaactcagccacatcagaaacgatctcgagctgaatacgctccgcaaaattggagccactcagtccgttgccaacttcacctggcagtccacccctttcctcgtgtcttgctctacattcactgtctttgtgttgacgaatgataagccattgaccactgagattgtgttccctgcgttgacgttgttcaatttgctcacattcccgctttctatcttgcctatggtcattacgtccattatcgaatcctccgtggctgtgaagcgattgatagattatttcaccgcggaggagctgcagaccgatgcagttattttccaagatcccgtggcgcattccggtgacgaatctgtccgtgttcgcgatgcctcatttacctggaatcgtcatagtgggcagagtgtgctggaaaacatcgattttagcgcacgcaagggcgagctcagctgtattgttggccgcgttggcgctggaaaatcatctttcctccagtcattgctgggtgatctgtggaagaaccagggagaggtgatcgtacgtggtcggatcgcgtacgtcgcccaagcgccgtgggttatgaatgccagtgtccgagaaaatattgtctttggacaccgatgggatccctcattttatgaccttaccgttgaagcctgtgctttgctcgatgacttcaagaacttacctgatggtgaccagactgaagtcggagaacgtggtatttctctttcagggggacaaaaggcacggttgactctcgccagagctgtatatgcccgtgctgatatctatctcctggacgacatcttgtcagccgttgatcagcatgttggacgtcacatcattaacagagtgctcggcaaaactggtctcctcggtggcaaaaccagaatccttgcaacaaacgcaatcactgtattgaaggaggctgacttcattggcctgctgcgggataagaccatcatcgaaaaaggaacttatgaacaactaatggccatgaagggggaaatttccaatctcgttcgctctacgatggttgactcggacgatgaaggtactgccagtgggtctgaagatcttgctagccccgaaagctcagtcacaacggccatcatccaaaacggcaatgcatcggatagcgaggaggcggaacaacttggtgaccttattccaattagggcaggaggtgaggcccgtagacggactagtaccgtcacgttgcgccgtgcaagcactgtgagctggcaaggcccccgccgcaagttgggagacgaggagaacgttctcaaaagcaagcagacgcaagaagtttcagagcaaggaaaggtgaaatggggtgtttacgctcaatacgccaaggatagcaatatcatggcagtcgtggtttatttgattgccatgatggctgctcagactgctcaagtggtgggcaacttctggttgaagcgctggactgagtggaacgaagcccatggaaccaatgctcaagttggcaagttcatcggtgtctacttggcgcttggcctgggatcatctctcttggtcattgtgcagaacttgatcctgtggattttctgctctatcgaagcatctcggaaactccatgaacggatggcatttgctatcttccgctcccccatgagcttctttgaaacaacaccatctggccgcatcctcaatcgtttctctagtgacatttacagagtcgatgaggtacttgctcgtactttcaacatgctattcgcgaactctgcccgtgcggtgtttaccatgattgtcatctcggcagctaccccggctttcttgctgttcgtcattcctttgggttatatataccttagctaccagaagtactatctgagtacctcccgcgagttgaaacgtcttgacagcgttacccgaagcccgatcttcgctcatttccaggaatctctgggcggcatctcgaccattcgtgcctaccgacagcaggatcgattcgcccttgagaacgaatggcgcatggatgctaacctccgggcttacttcccatccatcagtgccaatcgatggctcgccgttcgacttgagttcattggttcaatcatcattctcgcatccgcgggacttgcgattatgtccgttgcaactggcagtaaaatttcgccgggcatagtcggtttggccatgtcatatgctctccaaatcacacagtccctgaactggattgtccgccagaccgtcgaagttgagactaatatcgtgtccgttgagcgagttctcgagtatgccaatcttccgagtgaggcacccgatgtgatcttcaagcgccgccctgccatcggctggccggctcaaggtgcggtggagttcaagcactacagcacccgctatcgacccgggcttgacctcgtgcttaaggatatatgtctcaacatcaagcccaaggagaagatcggtgttgttggccgaacaggtgccggaaagagttcgctcacgctggctctcttccggattattgagggtgttgaaggaagtatcaggtaaggacatatgccatcatttgcctttgcgcttttcaagctaacaaaaatttagtattgatggacttgatgtgtctacaattgggttgaccgatcttcgtgggcgtctcgccatcatccctcaagacccggccatgttcgaaggcactttgcgtgacaacttggaccctcgcaatgcccacgatgacaccgaactttggagtgttataggtcggtttaacatattctattcaatttaccgccagcaactaactggtttgcaataaatagatcacgcgagactaaaggaccatgtctcgaaaatggacggacaactggatgctcagattcaggaaggaggtaagtgactgcctgcatctagacattgcctagggcatcccgttccctaacacatttctcaggctccaacttgagtcaaggccagcgccagctagtatctctcgcccgtgctcttctgactcctagtaatattcttgttctggacgaggcaaccgtaagctaatcctgcctttgcttttgaatgacagattcagctaaccatagcgataggctgcagttgatgtggagacggatgcgctgctgcagcgcaccctgcgcagtagcatcttctctgaccggactatcatcacgatcgcgcaccgcatcaacacgatcattgactcagatcggatcatcgttctcgataaggggcgtgtggctgaatttgacacgcctgcagagctaatcaagaagggcggcaaattcttcgagctagccaaggaggccggcctgctcgacagcgatggtggcattgcctactcgcaatagcgtatactgcaatcgcctgcagtggcctcgaatccccgcgtttcctgttctggcgaaaacatctctcagctagccagcccatctgagaacattgaaccagccccatccatgcagctctgattggggaggctggatttattttttggcacctcgggccgatcttgggaggtcccggatgctctctcgctttcttcttgcaggggtcacgttgccaacagatcgttgctgaccgttcaaagagtaggtggtcctgaatgtggcgcaggtgaccgtgcatatatgcatgtacatggtactgaagaaaaaattttcattgcacagttcaagggacccccctgaaagggatggacagacatgaaaaacgttggagagtggctcaatggtgcaatctgccgcgaattttttttttctatgctgtcctcgagtctattgttgtttcatgttgggatggtgtttgcctcgctggtgggtgggtgggtgatcgaggacatccgattggatttgaccctgcgaactaaacgataaaaagtgattccctttactccgtacattagctttcttgtttgccttgacatcttttgatcaaattgtggccgtgcacagcgtgttgatatctactgaaatagcctgaattcctacagcgggcattgcctagacccaagcagcaactgaaacgtaactatgcattaaacttaattaacacacagctttccttgactagggcatcgtctgcgatggttatctgcagtagcgtctcgtactaaacgtggcggtgtcatcttgatatcccatcagaagagcgagttattgtagcggtgaacggtcagccacctggctgtctatcaagggtgtctgttcgcaggcccttggggtcagcaatataacagaatgtcagctctacttatctattagtgatactatttagcgaagaggacatgaagtcaagattgtcgaatatcgacgcacccagaccctcctccgccacatgagccccccttctctctggttcgacggtcacatcctgagaatatatctccggggcaaaaatagacatgccttttttttttagatagctacgtatacgaggtgtacctccttgctgcctgcaaaacagactctccacgcggtcgttggaattgtagtactccgtgtatatgcatgtaaactgtacagataatgaggtgggttatttgcctcggtggaattccttgaaacatccgagatagctttcaaaatatatctgccgacagaaaagagaactaagtttgcccttgagaggggcaaagggaggggcaatgacagcagtctccattttgatttgcatgtcaaatgtttaatgggctttcaagtgctccgtatgttgtaatgattgacaatttcgaaacacaagggatatcacagtatatctcgcgtggagaatgaacgatcgcatggcattatcgactacctcctaccgaatctaattggatgcggacctgcgttcgtgatatgtttcagctattcagatcccaggcaagggatgtgtaagatgacctcaaaaaacccgctgcatgactgatctctctgtgagttccgggggacggcggcactgcttccttaatcttgtttaatgggccatgtcatgatgagccaaccagagcgagacaaatcgagatctccagatcgcgaactactacccaggttgtgcacgtcgacgaaagaagtaatggtccttgtaaaagtagatcgatctcgcacggacaacgcaaagatcaggttttccggatagctccagccggggaagagttgtgctttcctagcggatatggatagaatttgttttgctgctatttttgctgaatttttgtgctctacgccgtatgcactgttatggactcatggcatgcattcgtccgcttcttcctcttttggcccccagcccgaagcctccactcgaaaatggcaacagccattccccgaacgagacccgatgtcaggatccccgcttctcagcaggtcgatcgtacatagctatgtacacgtacggtgctgtgcatcagtggcgagtgggaagctgattgtgcgacaccagcctgcgagagctgagcccgtttctgtatggaggactggctgtcttgagcactatccactatgcacactaccggcgcaccagcggctccagctttacacatatgatggcaggaacctgaaagttggaagtctctttccggaaggtaacgaaccaaggcgttatcggtctgcggagatactccatcttcccctctccaggccagatctgacgtgacatatcgaaaggatattaattttcgtggttaattcatacttatttcaaaaaaggcccaacggcttgaactgcatattattggttgtacaataatatatcaaacgtctggtattgagacagaatcggggaactggaacgcctgcaagcctccgatcgactcagccctgaggggaagagcgggaacccacagacacaacacaccgcgaaaatctcatgcacgatgcacaatgcaccgatttcagtcctagactaccaatgtggcgggattaggggttcagttctcccggaggcaaagacccgcctcgggccacaacaggaagtggaattagggccatgatcaccgagggaaataccagagacagattcgaaggtttggattagaaaaagtcttttcgggggttcgtcttaattagctctatacaacacagatggggaacggaacataatgtggatagttccttgcgtcgaacagttcgaaaatgagctaatctaatggagccggtgggaatcaaagtggcaccttcatgctcgtaatggcctttcctgttggagagctacataatcagacagaacgcaggaaggcctgcattcagtagtccgtactccgtagtaataatggcatgcacctgaattatggggcgaatggagggtttcaaggtatttgtcattcccaggccccacaagaacgctttctcttccccagccacaaactcgcgtggaagccgggccttcccgggggggaaagccctatgggtgggattgaacgggcgaaagggatcttgctagttgatccatcgtgcctttcagtttcttcaccgcatcagatctccgccgaatatagtagatgatcaaagtctatacactggcatccgtttccagcctcaccactcgatcggaacacagatctccagggacgatcgcgcggatgctgcttcgggcaatttgtccgtctttgcaggcgacggggaccgaaatggtccacttgtgaagtgtttggggtggtggtattggcccgcggatcggagataagcggacactagagactagactggcaggctagcgtgattgctgggaatgagatatatcttgtcgattgggaaagatttggattggtaaacgcgatcgcgagtgttaggtttctgtggtggattcgtcttggagatttggggtcgagagtggcccggggaagattttacagttccttagctgagtttacactatcaacgcaaatgaactgcggagtagccagtgccagtgcacgggaagaattgtgcaatgattggctgtgggtgaaagttgagcgaaagtatgatgcaaggacctcttaaggcttaaaaagattccgatggattggacatataagccacgtctccattcactcatccaggtacttgggactctccaagatctccagccttcgaaggttggagtggttgactgagtcattgggtgtaccccacttggcgctgttgagttttgtggctttgtggtaacttcctgctgaaccacggaactggatgagtttatcagagttcaatccagagcttcatccagagttccaatctagatatggttcgaactatggaagcgtcgacatttgatagaatagttcgggcttttctccccttacatatgtcccatactctattctatgcgggtgatttccacgttcccccactgaggcgatgaggcggccggagtaattttccgcagcaagggtgcctcctgactatcccagggctaagcgagacccggaagtggaccgcgaacgacccattggagaaaattcggccaatctactcagactaactagatataaagtacgaatcacgccgccacctgccaaggtggatgtcgagattgctcgtacatagatagactagaccgaaatgatacagtctcaggggttaaggtaagtcttgcatgtatacggagtaccgaggtccatagtcggaaatttactctattcgcaacacaatgagtgaccaacaataaattgactgcagtagcgttgccccgactcgtaggaacaccatgggcggcccttcgggccgtgccacaatggagagatgattcgctgctgtttcacattgcttttgtttcttcccattgtctatccacatctctattgcaaacagtagagacagaaatattgcatatccatttggaatgcattaagttatcgaaagccatgcatagaatgcatattcgtaatgcttttcgacttacaataagataggcgacaaccttccaagctcggaatgaatgctcattgggattggctgccctgaataggaatgatgctatgatcaacaccactatcactagggcacatgagaactggacctcgtttacgaatccagatgtaagcatgactcggaagacctcattcgcatctggacaagccatcgcttcctgaaaccttagcctggcgttatcaaaagtggtaattgaatcaaccgaagcgaggctcgtttctgcaccaattccagcccactggatagagtctgaagggctctatgatcctcaactttgacctttcccttgggatagtggagcaccagctagaccgtatccgaggtttgacagctttagtttgaccggaccgccatccccggcccgccccagtctagtggcttggtggggaccagccggggcgagtctgggcctcagggtcttagcgagattggacatgggaccaaaggggatactccacagtttaggaaagagacatcgtcggacgatgattggccgctgtcaaaagtacaagcgcgaatggcacttccctgctaatcctaaaatggatacgacatcgttgtctggggagtcctttcctacgggtcccggcttcggccacaaaaacgccccgataaagaggggggacgctagatgacgcaatgccagtgcttctcagttcgatcgtgctcgatcgatgcgcataattgatcgatcgtgcgtgcggaggcccggattcgtgcaatagacctgcactagtcatgtgcgattttgctccgtcccgaagatcaaaatagggtgccggtttgataggccctgacgtgcctctaatacgaggatattttagcgaatgcagctatctcttgcccgactaggaaacaccctcctttcacgcgtgcaggttgcctctcaacggtatctttgacatagcacatagcacaccgatcatgcagcctccaaacgatattattgatatcgagcagactcatactctgtatactcccccttttccccctccgatcgcttcggtctatactccgtacgattggatcatcgagatttgaagggaactatacatgaagcagtttttagttgctaaagcatgaaagaaggcgtttaggagttcctttgtatattctgtttgtatatctgtactacactcatggcggtgaaataacctaaagacacaccctagtccctgtaatcagcccgggagtttctctagcgttccagaaatgtgcgacggacacatacatgaagtcgtttggctagatcgacaatccccaaccccgaccaacccataccaaccccgatcgtgtgatttgttgcagttctccccaatattctgacttggaccccactcagttatttccttcccgtcaatgcacacccgctgtcacaatccgccgagtccgggccaaagtctacgcctcattttgaggtttcagggtaattgcatcaccgaacaactccgctctaactctttttttgtacttcgtagtgtcagcggtaatagcggtcatcttaaaagttggcattgataaaatgtcgttctgaaactagtgtgataaggaattagaaatgccaagctgtcaaacttggtgacgttttgtctggggacaaaactcttacctcgattaaggtccagggaacatccatgaaggcttctttcctgtttagtcactgccaaacagtgcaaacattttgcctcccagtttccaccgtggacctgccatgtccctgtggcagtgcccaaaataggcgagccacgttgtgtggctggtctgagcttcggctaaggtaaattgtagggatcaccagttacgcgacccaatgagaagctttcgtttagaagtgtcaaatctttgatgatcactgacataattgtttaaagaaaaggggggtgcatctggaatctagacctccaagacattgaaattgaatattgcaattcggagtttcgaggtagtccgtagtccgtacatacggagaacccgtgatttgaaatgcgactagggctttattatttatttatttttttactatcctttagagggtgttgtagtgattcgcacgctcaaaagaccacggctaaacgccttgctaggaacagggaatgggcggcacaaacaaagagatatactatccggggatgttatcgctgaagccgcaggtttttcagatactggatcgagtatgggagtatgcctagttttacgtctttgcgccctcaaagaatgacaaataacgtatagagtaactactccgtgatcaccgtttttctagaactgtttagttcaacgatattgctttgttctatgcctcgcggtaacttaaaaaagatgggtttccgaaggcactgcggctctattgctgtacgtactacggagtagacggcacggcaattgaatgccatgtatgtacggagtttcaatgagatcgatcagatcgatacaatcttcatacgcaatcagattggagttgtttgtgctagaaaaattctgcctcttgcatcttccccgataaaggaccgaggaagtatgtgttccccttttgccatgtcaaaacagatatagtgttttagattctcccttttttaagtagccctgatcgaggtgggtatccatcttctttgtctgtagtttcaagacctacagtgcaagttgtagcgttatcccaagaaacgccagtgtaatccaccgggacgggagatggacgcgttgacagaatcctgggttaccgagtttccccttcccctggactcttagcacggacccgggcggagagccaggaggtctgctgattggtctgtcacaaaatgggtcggacgtcaaaaataccgccactaacccgccatgggatagttcgtcgaactattttgcaaccagttttcttccccgggggaaagaaagagtagatcacgccgtggtgttgggatttcaaacactacattatctcgatctgttctaggtcggattttgaatttattatagcttatcctcgcggataaaacggcgtaggcgagctacggtccgtattaccaccgtactttttgatttcccctttccctccgattgaaatgacggatttggtcaagattgatttagatcgatttggcgagatttgaggtctgatctcagggggcttttaagctatggattttaggtgctatactcagctgaagccaaggtctctgattccagaaacccactgtgtttggcttgccaccccggagtacggagtaggtatctgtcaatgaacggagatcgacagcagcaacaagctccagacggcaatgaaaagggaacagtgacatattatcggcgagtcatctcccaggatccaggatgatgggccatgcacaagccggatcttgataggttcaccaagaatggggaaagtgtggattcgttcacatggttggctgctagtgtcggggcactttggtgctgagatccgacgatcgagaaacacaaaaagaaaatgttatagataaatcccagtcacaagcaatgagtaataagtaatataatgtaatatggcggaataatataggcatcattatacacttttggtcctctatcaacatcgatgacaaattacttatcgaaccggagcctccgaaaggtctgtaatctgcacattaagaatagcacccacacggcgtcaaatagggcctgtgcgtctccccaacgggggcatttgggtgtgcctgacagctagacgcgagtgcttagggctaattgtgtcgtgttcgctatgatggacatatctgcgttgctaaggtctaggccaacggttgcctcgtatgccaatcgtaactgactgcgcgatctgatcccctcggttttgagtcttccaactgacagcaagccatgagcctgggttgtggggggttggtcgatcgataatgagcgccactcttggggtttgtcccgactggaatttaatggaatttcctccgtaatggaattaatatgagtttaaataatataatataatattcaaatatatataaaaaaaatataattctttataaattaaatcaaattaatatgcgatctacaaatagtgggacagggatcctggatcgggtccccaagtctaagctactgcaagtcctttgaatgcgccaatctgcatacgatcagagacggattcggcctcctaggatcatccatgttgaattgctggtcgattttggatcgtccttttgtcatatagtctagaactgaaaaaggcttgcatatccccttcttatccttctggatttctatacaccctcagctttatttaaaagatcatcccacttgcgcatcttctttttaagatatttcattctcgactgctccaacccccggtctcacatctctcacatacttgggaacacaaaagtggaggctgcctttcgttcctgcatcccggttacaaacagtcgccgtgctgcagttatccgctttccatccccattgagacgcctgcacattgttacccttgaactgtgtgagtacatcccagcaagttgcttctggctctgtttgccagagcttgattggacgccggtggccagattgccagcgtttgtcctaccggttcccgcgccggagcgaagatggctcttccgccgttgggttgttcatgaacaccctctgccggggacggaatggtgctgccgaagatgcttcgaggcagttggctgactggatctccacagtgctagcctttcttcgcactaaatcgcaaccccgccacccgagcaacaatatctataaagagaacagttctctccggggcaaacccacatcattctccttctctagtatcccgatacactattttgactgagactcaattaccgttctcaagacgatttcgtccagcacctatttctgctactatggtttacaataaaccaacaagcggagccatgaagagatctgcttcggctctcgatggacccccaggatggggagatgttcctgtatgtgttccctcaagagaaacacaggttcattcttactgatatccgtttagtcaatgatgaccaactcccgttcatcattccgtcctccttatactcactttgccatgatctacctcgaccgtgatggcaagctcaatgttgaggaatcaccttctattcaagagcaaaactccactgtgtttaccgcagaggtccgccagaacttcctcgagattctgggtgaacgcatcggctaccatgcccctcgccgtatgtccaagttccagacccgaagaccaaccagtatatgctgataccaatctacagagataatggacgtatctcctcgtcgagtgagacgtcgcaagggcaatgctcctgctctttctgtttgtgacaaccgcctggctgatcaggacactgatagcgaggacatgcctaacgggtctactgaaatggttcccctccgaattggagactctcaaaaggtcatggcctactatgaaggtgccctcaagcacttccagcaactgaactgccgtatggttgccaaggcgttcatcaaatttatcgagcctcgcaagcaggtccgacacccttataatggtggcaaggccccgccaggatctgcccccggtactaccggtgacccagaaaagaccaagcccgagtggtggcctcccggtgttatgcacaaggagcctgatcacctgagaaaagagtgtatgatttgcccatggtcttgattcttgatctactgactaactgagctttaatagaccgcattgagctcttgcttcacattatccgcaagctcggttctttcggtatcactgccgataagcttaaggatgttgctggcgacaccaagcgaagcttgaagcacgcatctcatgtcgagatcatctacgagatcctccgggtccgcaagatggaggagcgtttcgaacgaggtgaagtcgacgccagcatggtcgtctacaccatgaaccgcggccccagccctaagagtgatgaagaagacgattccccctcagtgaccattgaggagcctgagcacctcaaccagggattcatgacccccatctcatcattcgagcacacatctacctccttagctacacccatcgacaacatgccatcggcccgctccctcccaggcagcttctccatggcggagcctctcaccttcgaaaaccccgcccgccaggaccgcccctactacgccacaccttcccaatacagcgattcatactcgcagcccatgatgagcacccccgtaacatcggagatgatcagcccccacgacgtctcagtctcggctttcgactactctcacaacacctaccagaactccacgcctgatcagtcacgcgggggaatgagcggacactacgatacctgggccccatctttccgccagaacatcttcagccctgtcgactacactacaccagcgactagccagggcatggcccagccttcaatgtcctaccagatgcccatagtatcgcaaatgcatgacatgtcccatcaccatgcccagcaggcccacatggactccatgcaccaaagatccctgcctttccgcacgggatcgctgggccacccacaccccaacgggatgactctctcccacactgtctaagtggaacgggcgactggaggatggcgattaaatgggacatgggtacaggtatggatatggatatgggtatgggtatgggtattaacgaacgtgaatgagtgatggcactggccaacaaacttggcgctcatcttaaggccttgccaggggagttgttgtctttctttggggtttattggataaaaaaacttggtgtcctcttgacaggtgcaggtacaaatgggttctgtttgcttcttcgttttggaaatatttgggtcttgtgatttgaagtgattgatattccggtctttgtttttatctttcttcttttggtctcgcctttttttctcacctttttttttctttcttggtgttagcctcatgctttttttcccttggtcttctgttgagctttttatctgctttgtttggtttttatgggttttcttcaacgtggatggttggagctgttgatacacagatttgggtagatacttcaaaattttattcgttggtaatatgcaactgagctcctctatttcttttcacgatcttttcattagataccagtattcaactatgttgtacctatatagttgatttcctctgccacttcttggcgtgctctttccgtattagtgctccttattattatgttagccaaatgactcctctctgagttcctcattctctgttcctgacagtctaaggcggacacgttgctgcttcacctgactgtctgttgggcgcgaacttgaggctagcagtgaaagaccactaactgagagcaaactactgatgtttgtgctgccatcttgcgataacactgaaccgcctgtctctcctagatcccgtatgagcttttcaatcgtttctgccctcccactggcatgcaatatgtttccaattgctgcatataactgcaaatgagccggtccagggagatcaacacgcgggcagtgatttgtcaatgataccagcctgtcctttggcaatgcaagttcgcagacagatgagaagcgcgggaaagtttcgatgtggtattgatgaggggtcgaagtggcctcaagaacaaagtggaagcggcggaactcaccatggaaggtatcgaccatcatcataatattatccgcacgattaacagcttcggatgtcatgtcaaatgtagaccggagactcggaaaatagcgaaagatttgtgtccatatctcagagattcggcgctgttcatcatcagtgtcaaagctcccaagagcaaaagggataatgtggacagcctgtaaggttccttttggttggccggggggaaaattgtggtcagagctccaatgcttggtgatggtgcattgatagccgtctctcttcaaacagtcccggcggaggcatacttgttcatttcgagtcgctgatgtgatgtcgcgagagtggaggtcttcgaccgaatcttcaaaagcgaggcggggggatggggtgatggcgggggtcttcccgccctgggatagcaacggccgcaacaggcctgtatcgatgctgttggcaagctgccggatttcgtcgttgtcgttgcagtgccgacgttgatgcggtcctagatatgagataccgtggcaggggaagaggtcgtcgcacgcaatacttagtacgatggtccgggcttggaaacgaacacctggaatggttagatgaggataacctcgtcggagcagaggagaaagtcctggagtacctccaagacgtcctgcgtcatgcgcaggattctatcaattaaccataacctagaaagggtctctttatattcatatttacttattgcactacccctctatcgaccgctagtaccctgttcgtttactctttcatcatctcatttccgtttctactactttgttagtatccactaccttacttatctctcagttccttaactatttcaatcctcctgtgcctctcagttttcttcctcctatatctcttagctcgctatttaatatactacttattatcctacccttaccttactaatatacctatccggagatctgtaggtcgtaggcgttgtccttaagccttatagggacgcgcttatacccattatagtatagctagcgacctaaatgagaatactatagcagctgactataccgatactaataatgaccctctgcctactactaagtacaattccggcttacttatagataatatcgcggataatagtgacctaggcttacttagggaggctcttatcctacctaagagcggatggactatagataatctaaggccgaagctacctcctatactaagaactaacgttatacggtataccttctataccgagcgaaccttcgcgctcgcgctctactatttctataataagtctaccctatacgcactgcgttaggataaggcgaagatattatacctaatcgatagctaacgtaacagtaagatacctagcccttcgtcaggcaggaaaatcgatatacccaccgttacaatatggttcgttttctacttttcaattcataactactgggacaaccttaagtataaagcctgtcttgccttatcttacgtttaactgacggataagggcgtcttctactacctatacacgataataccgtaccagagaagttcccggttttaggcagactttgaccaatatagggatattcgtacctcgcgtgttcctctggaccccccgatgatcgtgtgggccaatggattgccctggttcccagtctacaaagcgttttacgtcctctgtgggagctggagccctgtatcgtacctcgtgggaaggaagtaccgctccaaaaccactgagttttacatcggtacagcactggccccgcctaccgctgtcttggccggtcttgaagattctctgccgcaattaaccctccgagcatttgattcagcgacatacccagatcctaaggacacaaatggccccctcgacctcgttcatgtcgccaccatcagccgtagccaaaacaagaccccctgcccgtccactcgctggcctaatagggagacctctggaaaggcgacgtacgcctttttgggttctaaagcgaccccgtgcttttcgagcacgtccaggacaagggtcaagtgttcgacatgttcgtcgaaggtatcagatgctgtgacgagatcgtcgaggtacgcacggcagaactcgacgaactctttcaggagtaggtccatttgcctctgaacgtagggcacactgttgcagaaccccatgatcgcgacatgaaacttttcctggccccgatgcgagacgacacatatccgaccgcgatgttcgcgtcggacgcgccattgatagaaaaacttagatgcgtccaagacagtgatgaacttcttgccctgtgtcagaagcaaaatatcatccatggtcggaataggataaatatcgcgcacgacctctttgtttagcggccgaaggtccaccacggcgcgacccttacgctcgggctcgcgcccgggccggtgagtagtacgccatacaacaaagacggggaaacccgtagcagtatgtcccgttgtataactcatcttcccttggtcatgcaacggttgaaaggcagcgtcaataacctcgcgatccttaggaccaactgggtaaatcttagactttggaagccgtgcctcccagccaggtttgaggggaatcctgcccctcgagggggaagtaggtaaaacagatctcaaggaaccttttcgtgtcgtcggtatgatcgtcgggatctgacgactcgtaacttgaaagcgcgacatcgagggataatttggcctcggcaaaggtggagaatccagttgatgaaacagcagggctgagagtctcatctgactgcgacattgcaaacaagaggctggaaaggtaaaaggaaacgagtggtacagcggttcataacattcaacctgccgtaaccctttctgccgcctgcgtcacctagttagagttatcaaaagttacttcacaaaataaacagaattatagggccgagtgctctctttgaatagactaagcgtaaactgagtgcacaatagataccttcgacaaatctctaagtaaataagcatactcaccgagtcacgtgattattgcggagcgaagcgtagcaattaaatcataacctcgtgtgcatgtcacgtgaacgttcttttcttgtttcaatgcggtgaagaagtcatcggctaactttggcagaataatccaaccggcagaataaatatagactaggcctaatctggctagacgataatttctattacgtgctgtaggttacttactagagcagttactagagcagttgctcaagcggtcattaagcgattgcttaagtggttagttacttaaacagttacttgaacgtttacttaagcggttgctcaagcggtttctcgagcggtttctcgagcggtttctcaagcggttgcttaagcagttgctaaagtaattgacgataaagcagtttgattaagtagttaataatgatatgataaacgggacttaattttattagtagtttacatataaattgaaagtacctgctatcttaaaagttactactaccatagcaggaaatatgcctaattgtgaaggcggtactgaaattacaggcatggcagagaataagctagtaagagggggctttgcgtagcattagaagttggaataagtcgcttcgctctgcaacgactatcaagatgggcaagccccatacgtagagaaacctgacctggtcgaggttttacctataagtgtcggtcttgtacttattggactataggactcttttttagtttcatatattagattctgtttcttacttcctttccaaaactgttttgtatctattaaattatcattttttcctccgtacttgtcttcgagttcgaatccctcctgacgctccatatgttgcacaatatctgccctcggtggatatattgatatctgctgatatactaatatcatcttgtcaatatacctattgttacttcagtctaattggtcctggaataaagacttcagccgcggccaattcgacgcgccagccgagaccagcgcttggtcagcggagtaagcggagccactccgctcagcttgaagctccgcgaccagggaaacttgcatttccatcctcttcaatcgctttgtgctcagtacgtgcttgacttccgctctttattctcatgcaggtctcattttgtggctgattaactggtgtcgcctttctagttcacgccacgagcgcaaactccgacgcgcacgcttcacgagcttgaacacctaattaatcgcaaataccgaaggcgacagccctgaggtcccttgcacatcctgccgaagggaaaagactcgtgagtttactgacaggtagcgcgaatacctatccccgagtctcttcaagtctccttgcggctttgtaacatgggctgacttctttgttgtcgcctcggcgcactaattccagcgaacagcaaacttttcagatcttcgcgcaatcgactttgcatctatttcatctcggaattattgacccccaaaacccgaaatcgacttgaccatagagcgagcggtggggctgtttcaagaggtggcggcctatccagttgaatccgctctttgcgggcaggatggctagcccgttcaatccgtctgcaggccgtggcaggggaggcgcgccgggcgtgccaggctcaacgggacggggaagaggtggacatacggtgacatatgtaccgagaggttcaagtgcgcctcgcgcaacgagggctcgagggcgtggacgagggtcggtgacatggacagcgcgtggccgtggtcgcggcgcaggcgctgtgaaccacaccgcaaatggatcccagcaacctgcagagggcctcaaccctagtgttgtcagctcaccgtttgcgcaatcaaatcagcaaaaatccgtcgcatcgccgttcggcgctcagcctgcacagcagtctccgttttctagagtctcaaacagtgcttcggcttcgaacgtcgccaagaacccattcgcccaacctatgaacactacgaaacaacaatcatcgaaatttgttggcgggggatctaatgttgccgcggccgtggagcatgcgtcgacgttgaacaattaccaggaacgctttgacaaagtcagtctgcccttcctcgaaaccggacgacacgaccacggagctaacccaatctgcagctgaaaatcgatcaagtaagacagcgtgaacgagcgatcaaggatgggcaaatggcggacccgaatcagccgacttctttaaaccaggctatcacacccgtgggtacctgtaccggcatgtgccctgatttcgagagggtggagcggatcgtgcagaaagcagtggacaagtgtgaaaaggtaatggtgcgctgatctctgtctttggcgccacactgacgcgactttagtatcataatccgtcaacggaccagctggaaatcatggaaaccaagatggtgaaacgcttccgacgtgcggcagctggaaatgacgagcaattgccctcggatatccgaacaccaaagacacttttgcaaactatgaactatctcatccgttatgtgatcaatggtggtgaaccgttggctgtcgtccacatgtttgtctggaaccggacacgatcaatccgaaacgacttctcagtgcagcaacttacacatgaagaagatgtgaagatggcggtcatttgtctagaaaggattgcccgattccatatcgtgtccctgcatcttctttctagtccagcgaacacagagcagttcgaccgtcaccaggagcgtgagcagctcaacaacaccatgctctctctcatgtactactacgatgacaaccgcggacgcattcacttccccaacgaggacgagttccgcgcctaccacatcttgttctcgatccatgaccagcggcctgacctggaagcccgtgttcagagatggccaactgccctactcgcttcacctcgagtgcaggtggcattggaactatttgccgctgcatgtaatacatgggagcctcaaggtgccctggattctcgccgaccgaacgcaattgctcagggattctacactcgcttcttcaacatcatcaattccccgagtgtgtcatatctgatggcatgtgtggctgaggtgtacttcaaccacattcgtcagacagcaatccgtgcaatctggaaagcttactgccggactccgctatcacagcaatccaaaaacgataattggactgtggaggaattaaccaaggtgatgcactttgatgacgaccagcagacaattgaatattgcaatgcccagggcttgcagttcgtggagaatgcgagtggtggactgtatctctattggggtgatcgaccagttgactctgtcggtaagtggtcttaaactccatctcgaatctcgtctctcatttcccacctcaccctctccgtcgcgcctgtttatgatagcttccatcgtatttcttcctctatctttctttcgtgactaacaatctcccagactttgcaccttcaaccgaccactctttctctgaaacatacgtggagtccaagcgcgcaggacgtactcttgttgcggttatactcggcatgaacatcagagaagccgcaagaatgggtatgattgatcgttcccagttgcctcataagagtgaaaccttgcccgaggctgaggcagaagatggggatctcttcgtgagtgatattgacaatcagacacccgcacctgtggttgaaacacacaacaccattcaagacacatctgcttctgaattccggatcgcttctgagtctcagaaatgtctacaatctactcctgcaagttcgccttcactgttccagtcaaatctaccacccgccgcttcaaagtcgccaaatcctttcggcatctttcagccatcaaaaacagcatctcctccctcgaatccattcgcaacctcgatcccctccaccaccgttacaccctcagcgccgtctcctttcgcttcttcgccaaatccattctcgttcccgaaacccgagaagaccgacgcctcttccctgaccactaatgtggcaccctcgccctttcagacaaaaccccctcctcagaccgactccgccgataagccagctgtttcgtcgattggctctgccggaccctcaccgtcacctttcgcctctactccttcttcttcgtccatattctcaaagccagcgtacgcaaagcccaagacagagacagctacaacaactccacccgtgcctgaatttccaaagcccattttcttccctccggcatcgtcgactgcagacaaacccgcctccgtgttccagaatggctccggttctgtactaccccctggcccgaatcctttcgctgcgccgtctccattctccttctccgagccatcagaatcaacccaaaagacagaggctcctgcaactattcctgcgcagtctacgttcaagcccagcactttgcctcaagagccgtcgactggggacaaacccgcctccatattctcttctggcgccagcgctttcactgcgtcgtccccattctccatccccaagccatcagagccaagtcagaagacggagacaccggcggcagttactaccgcaccctctacgttattcaagcccataagctcgcctcctgcgtcgttaactgaacctaagaaccccttcgcgtcctcgatattctctggtgccaattcctttggtcccacaaacacccctgctgctccatcgctattccaaggcatcaaaccccaagagacagctgtcaaaaccaaggaacctgcaactgcgcccaatttcgggcagcccttctcgccattctcggtgaacaatgctagtacgatttcagggtccccgaacgcggctgcaaaccaatttccagtccctggctcaatctttgcggctctgaaggcaacacagccaagccagaaagcggatatcccagctactgcgcccacaccagagaaccagccatcagggttttccccgtctttgggtagtttacagtcgcccaagccgagtgagacttcggtgttcagtcactccgcacctgcgccggcccaagtacctggcgcacatcctatcaacggccatgcttcgatttcgggttctcgtcggtctgtctcgcaaactcaggcgaccgcctattcacctccccagactctttttgaagcacttcgacagcctaaaatatttgacaccacatcgaatatatactcgtctgaaacggcgactactcagccaacacctttgttccaaacctcagagcactcagtggtgccaggacagcaagggtcactgaaacgacagcatgaggccagcaatgcaaatgtgtcccctcagcacaagaggcgctcctcgctgaagaaaaaatcccccgaggcagcgtctgatggatcattcagacggtcggtgcatttcgaagaggcacacgaaaatgaacctctggcgccggaatcgcaagggcgcaagaagtctaaagtcctccaaaagaagcgagtgctggatgagcagattgagccccagccggaggaacagggtccgagtactaaggtgtccaaggtttctccagaggaagagcatgtccctttcaatttctcggtctacaaagcagaaaaccgccccatgccgaagcttccgatactggaaaagctagaagaaaaacttgcacgagccaaggcgttgtgcgagccaaggcgtcttaccgaagaacaaatccagtacatagaggaagctcgactgaaacgggctcgccaggtcgacgaggacgagattgcgctctcccgggcacgaattttggccgagaagttaaggaccggccctggaatcttcgatggttggactggaaacatccgagagccatggcacgatccaaactggaaccccatttcccgaatcgtggaaaagtatcaagcccgcaatattccccagccaacttcctatgtacccccgcgtctgacactcaatcgctccgccagaggatacgaggtcgcctacgcacctgataccccggaccgacctatgtccagaaccgaacagcgtatccggcgcactggtgcccgtgggcttacacatgtgcccctggatttcgaacgccacaggcgagagaaagaggagatggctaagagcaagaacggaaagaaggagaatacggataaagacaaggatgaggaagagaaataggggtctccctagggtgtttaaggggatgcactacgctttcctcattcctcatgctgtaattatctcatggtgtatcttgcactgatttattctgttctcatatgggccgtggatctaagtgcccgcctactctctctcatctcacatttgcattttgcggagtctttataatgatatctttttcctcaatagacattcacagcgagaatttattcatctcttccaattactttctactttctttttctgtttatttacagcctggtttataacaggggcgttcagttacgacggtaacaccatgtatagatctgctatactataacggtagttttgttgaactacaccgtgatactacatatacatctctagacatacccaccgaccccatttagctagtaaaactacacacaacagtacaagtggctaggaattgctccgggggacaatttttgtatgaggctggtacgtgcacgacaaaaacaccatacaaagtgggccactttgtagagaccccgagtgacttttggggaggtcaatccaagttgactgtgtagtagatataaggatagaaaatgatatactgcacgaccatacaatcggcaccttccaaagccggaaccttggacgatagacaatgcacaagacataatgcggcatgtgactagactagccagccaatccttaaccgctacttgcgacgcgagcctgggatccaaaacaagccatattcgctcgaagttcggacaacacgcgatatgaaccagtgtcaaaaaatgacgcggaatcttcttaacattctcacacgtcccttcaaggcgtttcgccagtcgccctgggcattatcgtccgcccttccatcccgaatcgacgcgtccttgctggttgaagaggagacttccccctacgaaccacctatttttatccggcgcggatcggtgaaatacttaatgaccggtatcaaattgcgaccaagcttggccacagaagtagatcgagtttatggcttataagggaccttcactagttcgtattagcctaatcatattttaaggtatttattgacagtttaggtggtactggtcgaataagcgatatctagctcttaaaattaactctaatgattcctatataaggaaaactgctaataacgttaagctagaggttctgtagcttataatgagagcgaaccgttaatataagggctggcgtttcgttcgaaaattacttgactctttttctgtccagggaatctcagggagtcatgtatgtctcgtcttcgagcctttacgtgagtcactgggaaaatattgccaacgatggcaagatggtgtgatgccaccggagatttttaaaataatactccaagaaatactccaagcgcttgattatctccacactgaatgtcatatcattcataccggtaagaattctgatttgtgttagttaacaatatggttcttattcagaaacagacttaaagctagataatatcatagtacgactagaagattgtgagctcttatcccaggatgcttaagatgagtttaaaaacccactacctcagaagcattgtaacgatagatatatcaacgatagacatatcatctatctatcctataaggactatgaaccgctgaagaaaatcatcagactgattgaagtcgtcgactttgatctagcagtctaaggtgatattcttcaagatggctgtatccaggcggaggtatatcgtgcgccagaggtcatttttgacagagggtatacgtatagtgctgatatatggagcctgggagttatggtaaacagtattcccctaatactagcgcagataactaaccattgaatgaagctatgggattttctagaaggacgaacactgtttgaatcagttgatccacacatcgttgaagactatgatgacgcaacgcatcttgcgtatataacgtcgcttttgggtcctgcccctaaagactttgttcgccgcggcaagaggacatcgatattctatacggctgctggtaagtaagtctttcgattaaattgtgtaaactaacactgcattttaggaacactcaaaagagaagaccttgtgcctagtaactttagctttgaaagcagcatctccaagtttaatggggaagaaaagaggatgtatattaagttcgtcaaccggatgatcaaatggaaccccgaagagcgaagtacggcgaaggagctactgcaggatccatggcttcacaatgattatccgcaaatataggcggagtatgcgggactgtggagtacttctctgggccattctttgacaacaacggtattactaggtttcctatttcgaacgcattattctcagaccaatgaaacatcttaggccgcttcctccttgaggaccagatccccgaccgcaaactagacgacacagcttcttttcttgaggaagaggagagggaagcatttctggatttcgtcaagggaatgcttgtttggcatcatgatgcgagaaaaatggcaggcgaactggccgggcatccttttcttcaactaaggtaaacaagagcctgatttctgcgagcgtttgctagcggaacgacttgacttgatggttgatcccagttcggcgatgccatcagatgactggttgaagcgttatgatatcgatcttgatcttaggcaactaggtgtcaccactgagtgttctacgggcgactcaccgcatatgtatgcccaggtggatgacaacattacatttgaacccttcagctattcatccatgccgactctcaaaagtgaattgaatgtttacttggaaatggtatatacactgagaaactcctcttttatagactgagcaacatcacgacgtacaagcaccgctatagcagtttgacccagaacagtagtcactggtacttccacaataaccagacgcggaacagcacgtcccaaactgggtaccagtgcaggtcttgtttccggcaaaattcgggccacattctccatttgtggacgggccgccattatcagtgtcacaactgccagaatagcagttccctgcaccacaataggtggtaccattgccgcagtagccctgtgtctattatcagcgactgcagtgaataggaaggatggtcatgaatggatactgcatcacttacgtatatactacagcagtttccgaacttgggaatacaagtcgtgcccccataatcaggtccacaggtgccgtcttgcgtcgcggtgccgttgcctgtgctgatacagtaatctgacccggttccgcagtagccaaatggcgagcagcagtcgccaaaggcacttccaacacaggtaacccccgcagggcacgtaccgtccgttgagactgtctcaggggtgacaggggcgacgcatatgtcgtaattaagccacaggttgccgcaggtggagttaaggtacgggttatactcttgcaactggctaaagttcagaccgaagcgcaggtcgatggtagaacagtcgtcaccggctacaacgagatagtagttaccgcactcgctgatggttccactttgggtcgggtaagccgcagtggctgctgtgtagtaagtaggctcgccggtcgcaccaggcgccgtgatggtcgcgttgggtttaggaaacgttcctccaggagcacttttttctcgccgagtctggttagcatcactcaatgccgcaaatgcctctattgtgtccttcttgatcttagacttaccttttacatacacgctgtcctgctgcaatccctgaacaactgccctggatattagtattccagctaagcaattgagcagtggtcacggtgtaagtcgagttggaatatctcgtggcaaggccgtcactattttcagaggacttagcacagattatggtctcgtggcttcaggcaaccattatgccctacataccaacttggtgtatcccaaaccgtatcgatctcgcatggacgggggaaacaggtagcctcgtcgaaatagcaagcgtaatccccagtggcaactctagcgtcacctgttgatatattgtacctaattgccgcatgcagcgcattagaaatcagccagcccaccaactattgggggaatgccatccatacgtatcgcaaagatcattgcaggtgagccagttttgcagcggctgcaccatttgacccagacaagtcggtgtagttgttgcggaggaacctgtcgtcgttacgctggtggtggtagtagccgttgccgtccctacgtataaggtggaggctgaagtgctgtaaggcagcgttgttgagcaatttgtttgaacaaggttgaactgatcgactaaataatccgtgaaattggtaactggtagccaaggattcaggagacgttgccgatacagattcaagaaacactcattgcagaactacgcccagttagtagacaacctcgatggcactgatgtacttcatagggagttcacataccaatttctcttcatatatattagttagagcggacatgtcatcactgatatcaccgacgtcaaaatccggatcggcacattcaggcgcgactgtgctgttgtcatcaccatcggcgaagcacattgttggatcccaacggatatagtcacttccttgccatgtctgagagaccaggaaacaccaatttgatgaactgtccttcatgcatacaagatcggaattataggtaaatgtcagtggtagcgctctcgccttgaccacgacattgccctggattgtggtctcttctgcacagactgttgcaacattatccttccagaaactaagggacgagacacagtctgtcgtgcagaggttctctacctcagcagtcgtccagactttatttattagcttcgcttcttcgttggcagacaacaacatgtttggacataacaagcttacagtggatgtctgccccgtgtcctaataggctaatagcggtttcattgcaagagacggtggtgttcctggtgaggtgttaaagggataagacatttcagggagacggaaccagaggcaagtactcacagtgctgcaagacacgtactgctcagagagagcccagcaatcaaggcgtctgcatcatagtttttgtacagcgcaaaatcggccgcagcccaagttgtccatgccgtaagcaggacaaaacagagtctcaagaaggagaataacattttgtccattgggtaggcaaggagctatgataatcgaattgctcttgcacgaggatggattggacggcatgaggaacaggaatgtccgggcacttttctctcttcctctccacacgaagggctgcttggagtgcccctcctcgatgaagacgctatcatttatcccgccggtttccccctgcatgatacaggtactaggatatttcgggcaattcggaagctcgtaccttgtgactgaggacttggtttgcttcctgttagcctgcacaaggataccggagattaggtggctgcttactcgggatatctcgtccatttagtcaccggccccggaggccagtctcttgcagccaatggccgaagcgacatgtgaaatcttcccataattgactgctagtacttcgttcaacttgggggccaaaggagatctaagccaatcggaatataaataccttatccagagcacacgtgcggggttcccactcaggaatatatcattaagcgagcacttgagtaaacggtctaaggttacatctgggctgcataagaggtttgaggtaaacaatgtcagattttagttaactttcgcagatgcttgtcatggttttcggttgaaccgagaccgaagttctcccgtacctgcacgagccatcatatcatggagttgattgtgaaagcaattgacaagccgaaagacccagaagtgacgctccaggaccttatttggcctagtactgctcttagtatggctactcctcctccaagcctcaccttccgtcaggtattagtccgctttccacaagcccctctatttccgccccggggccgtcaagagaacggatgagtacgagaacatccctgcattcacggtggtccagatctccgcggattctgcctaatggccatggactttggacttcagcccttggtgcaagcctctgcaggatccttcggggaaatagcttgtttgggcaatttggtggtagtttgaggagtaggataccccctggcgtgcatgcatccaccatcacttcagtaatatggatggaaaataaagggcgctggcgtgtgaccagcttctcgtcttctttgccgtcatttccgcccccctatctgtgccaaaagaaattgtaccctgtcttctccagaggctggaggttgttgtgccgttgctccaaagacttcaacgacaaaggtcagagtggcttttgttcatcagtccctcattgataccatttgcgtgttgagctttggcagcagcttcaatgcgaatccttctgccagcgcttcttgctctcgcaagttgcgggatttcccaaggtcgtcaacaaccccatgggaaacgcaaccacgcgaaaccattgccagagttcactccagtgccccaattgccaaagaactcgtcttcggccctgccgcccctctaccagccctattcaaagaacaaacctaagttcgaaaacgaggcccttatccggcaattgtctcagcatccagggctaagacttgaccatcttgactctggccctggctctatgcgcaaaagagaccttcccgtaggcacttgcgcacctggagtaccttgcacaaatggagcatgttgttcaaacactggcgtttgttcctacgccccctcgagttgcggggctgacgtctgcatttccaactgcgacgcgaaagctccttgtggggaatacgccaaccccgataacgcaacgtgcccgctgaacgtgtgttgttcgcaatatggattttgtaagcctcagattcgcttggaaatttctcatttttgagagcagatgctgacccttattttaccccccaggcggcagcactgatgacttctgtggcactggttgtcaggaggggtttggcggctgtggagcagctccgactccttcttgctctagtggtagcaactctgcggctgcgcggcgcatcgggtactacgagagctgggcgaccgagcggccatgtgatgtttttacagctgaagacctcgagctgacgggtctgacgcacatcaattttgctttctcatacttcgacccatctactttccagatctcgccgatggacggaaatgcggccacactttattcgcgcttcacggcgcttaaggcaaaacagccaggactgcagacgtggctatcagttggcggctggtctttcaatgatgcaacgaatacgccagacacacagaatgctttcagtaacatgatcagctcctcggcaaatcgccaagccttcatcacttccctgcgcaatttcatgcagacatacggctttgacggcgtggacattgactgggaataccctgctgccgacgatcgaggcggtgtcccagccgatttctccaatttcccaaccttcctggctgaattgagggcctcgttcggtagcggattgggaatcagtactacacttccatcttcatactggtatcttcagcattttgacgttctggacatggagcctagcgtcgactggttcaacttcatgagctacgacatccatggcgtctgggactcgagcaacaagttcacggggccttacctccgcccgcacaccaatctcactgaaatcaacgacggcttgtccctgctgtggagggccggagttaacccatccaaggttgtgcttgggctgggctggtatgggcgctcctttacgctcgctgatccgtcttgtaccacgcctaacggcgtatgtcagttcaccaccggcggtactgcgggagagtgcacacggtcatccgggacgctttccaacgccgagatcaaacgtcttctagcggccggaacgggaaccgaatcatatgatgccactgcaggagtccgctggctcacctttgatacgaaccagtgggtaagcttcgacgatggagcgacaatgcagcagaagctggccttcgctaatagcctgtgccttgggggtatcatgattgtaagagaccactttttaccacagtcaccaattgccttccttcgtttcttatttttttctttgccctctctctcactcttaacaccattttcctttctttttttggaaaacatctaatcaaggctttcttccagtggtcgatcgatcaggacaacacagctggcgacagtatgaacgacttgatgggcatcggtacagcaaatggggtgtcagaggcagctgccgcttcattcaaggagcagatggctaatgctacgctgcagaacgctgttgtatcgagctgctactggtcactatgcggaggggcctgtacgaccgggtattttgatgtaactgatgcccgcggccagattgccggcttccagcagaactccgtatgccctccaggcgaagcccagacactatgttgcgccccaggaacctcgatgggcacctgtcaatgggagggtttcaggggcgtgggaatgccttgctcaccggcatgctctgaccccaaggccaccattgtcgcccgtaataccaactcgtacgagatgaacgatggaggtcagcttgaagatctgacttgtactggtggcttccaagcatattgctgcacggaatttgtcccttcgtcgatcaccgattcaggcaacctcttgctctatggccagactcctgtgctcagcaagcgagacggttctaatcagggcctcggtctctatgtaggcgaccacgcggttgaaaagcgttctttacccttgctagtctccgggttgggcgctctctgcctcgctgacttgctcccatcgatcctttcagcaccgttgacttttggcctatctcttgccgcggagggggcaatatgcggtgctacggccgctgccgtcgtcgctactgcggccatcatcggcttttcaattctttacaacctggttgggtggattttcggcggatccccatctaaacccaacgttggcgtcccaacaacagtagcgggccggtcttcgtatggccagtggccgattctcgacttgagcggcggcaccacgacgagtacctgcgattgtgtggtcacatatacgtgccgctatggcatgggttgggatgagatttgtgataaccaaaggtggggggtcgacaagctgctcaacggaaagactgtctatcagccgttgccaacgagccgcgctgccggtgctaaccaaggactatggaaaggccagcgcatagaggcataccgaactgcggcccaattaaagctcccaggcaaaacgtggcgatgtcaagttgatgagtttcctatgggcaacctcgcggaatcaggaaataacgccccgcaggcttgccgtctagtcaacggccctgcgaatgcaaaacagggaaatgattacaagatgtggaagtcggcgcagtggaaaccttgctcgacgtaccgctctgccgtgtgcaacagtagggacagtgggccgcctgcaacctggtatgtaaaaccgaagcttccctcatgcgatcatatctgaccttgaaacagggcgtttggggtgctacccgcgggtcgcggtagtggcagtggaaaacacttcatagatgcttatgatttcgacgagcaaacggccggctcgctttgctgggctacatacacttacaccgagcagcctggaactatcagcacctccacgcctgtcgaccatggtttccgcgttcttgatgatgatccgtatgtttccatctcccaactttactaggtagtcaatgtatagctgacaagacgatgttgataagcatgtacggtaatgcctatgggtggcctcgacagtcctggcgcatcgatccagctccattagcgaacatggcagaccggccgtatgactcccaaccgacgatattccaaagaggccttctcgccaacgacacatggcccgaggagcatagcgactccgctggcgtctgccacgctgacctcagatcacttggcgatgacaaacaggatgtttatctcgacctggattatgataatctcctctttgtcgatctggatggcaaacctgtcgacggtcggacatgcaacatcatctacgaggatgacgacccgcactccgaagtgcgtatcgtacttgatgagaatggtaaggtcgtggaaatatatatgggcgacccagatgctggcttgtggactagggaggcgcttaaaagttccaattcggacaaggtgactattgatcccaccaccgtgactgtcatggcgggtgtcccggcgggcagcgagtcccgacccacgtttcctgcgagtacgactggactccagacgagatcgggaaccgtagtgacaccggcgccgcatgtgtacggtctttgacagcatcaaccatgtcaatgacgaacgaaaccttggaagctatgggggtttataaatatatcatctgatatgacgggcttttggctaggttgggaagatatgaaagaaaatggaaggatcgagactaaatttgtaaataaatcacaatcgtttacgaaaatggctatcctcgtgactggtttcttttgaaattgcacatccctcttcggccctggtacctccatttccgcaggatagagctcggaaatcgtctccggattgaaggcaggatggcactgggatatctaccatgtgggagggatataataatcctcccaacggtccgattcagcatctctgaaagtatcgatagtaccttctaccccttccggcccaatacaccagatgcctttttcaaccagcttgcgccaacaatccaacaaacgctccagccgctgagggcgatagtagtcaccaccaaagggcttgaatccatgctgaaagagctctgaaaagcgtccccgatcaacaaactgcccatcgctttttcgcgcgcctactttcctgctccaatcatcattaaaggtgaacgggagtaacagccgaaatccctcctctgttggttcatcaccgtttctctccactgcctcagtatacaggcctgcagagacgtgagacggtgtgcacgttttggtggacgttgaatagaagtccgacaataaccatggacttgttgttcttgtgagctggataggacgctggtctccggtatcagcgggaaaaagacatactggtggtgcggtatactcagagcggggtaatacactgaatggctgcgctgccacaaatccagccgagtcagctgggggcaggagaaggcccggagcgatatagtagaaccagggccgtctcgcgcgcgtcagaaacgaacgcgcaaaggatggatcgggtaccgaagcggcgtccaggacatttgatgcgaccagtggctctcgattatccgcatcagtcccggaaatggggctgatcagtaatggtgggttcggcagctgcgagatgcgcgcctcaatgacctgacacagtcgatcccactcggcgacacacgtagtaacctgggcttcgctatagggccgccactcccagggcccgattttctcaaagtcaaatagggcaggctctttcttaggcgaagccacaacttttccaagatgaataaggtcgatccagtgggagagcagtgtctctagtgggttccagacgtattgattatcctcaactggaaacccgtggtcataggcatcaatatgcatgaagatcgcgacgcgatggaagcgttgatggtagataacactgccactaccgtccacatgcgatatgacggcgtacaagcgcatcaggctgtcaaccggctggtcatgcatatcagcttcagcttcctcaaaaaggttgtttggcccatcgataccccatgcaaaaacagagaatgggaggtattcgtgaggattatcaaagggaaaggagatatcatagcagtgccaaggaacgccgccagtgacggatcaagccttggacgacaagcctcagcttcagcttcatcaccgaaggccgtgaaaaagttgtcgttagcattcagagttgccagtgggcggccttcagcgagccaggcatattggatcaggtagttgtgtagagctgcacatcgtgcgtagtccattccttcgagatcatctcgtggagggttatctggcctgacaagcaggctggtaatatccggaagttgagaaagatccattgagaaaaggggtgtgtggctgtcaaaggggtcaatatcacagcctctatccaaaacaccgaggaccagattagaaccctcggtcgtcaataaaggacaatgtggtatgatgaagtgttgaacctgttgagtgcggttggtgtacggaattagtaagctggaagccgtgccttaattctactgatcagctttgatttcccacatgtgcagctatcatgtactggtttaccccgctctcaggtacgaaggtgtatagcggccaacagtcggatgcctgattttactggttttataggctaattgggactagctcttaccatttttagaccgcctttaactcaatagttacatatgtaccatcttttgaaagtactaacagttccagagcagatactggaggataaaagcacatgacagaactctgagaattatggtgccagtgtcaggaaccagaaatttgctagaagttgaattgctcgacatagcaagcggatattattcgaagaactaatggtcggcttactttaccaacatgaatttgacacagttcaggtacgcggctctatgagtcggatagtttatgccgctattgttcgttggatggatggatggtttcatatactctggcctcctgtttttagcctataatgcaaatacatgattatctccaccaggttgttccatatttcctacgatgaactttgagcctcaccgtgaaggcctgtaaagagtgagattgacagtagtcaagatgtcagaatatcgtaatagtaaggtcatggaagtttgagattaccgtcaactttagtgagtttctttagccctgctgaaatagaaggcgctagtgacgaggaggcgcggcgaaactagtccggtatgcatctacaaatatgcagggccagtaagtcgatgtatatacgacattgacaattttctttaaaactgtctcacggagttttcaggtgtctcggtgcagactttttgatctcatattactgtgtctgcttactagacagcatctcctcgaaatatatatttagacgctatcggggaatgctatatccgaatgccggggagacgtcattagtgctttataatcaactttatgcatggcctcgggaagtttaactttattttttctcctatagttttgctctctaccgctacatccttctacctttttctatatgatactttcgtggtaattggtattttggggtcttctgctttttttttttctctctcgcggtaccgctagtagtagcaattacgagaaggacaactttgattcttggatcctccacgtattcgctgactaaggcccgactctacgtcacctgggcaggctacgccacctcgtccagctacttctcagctcatccttatcgcaattaagcaccccacagcttcaatcaattaatcgcaatggcagagaatatgaaggcgtggcagcaggccactcctggtcctatcgaggagaagctaaatctcgtggacaacgtcccacgccctaatgcaaccgccctcaagaatggcgagattctcgtccgcgttatcagcgcttgtgtcaacccggcagactacaaggtcacggaggcgggacttctcgcccgtgctatcgtcaagttccccaaggtgctaggcatggacctcagcggcactgtcatggccgtggctgagggatcgacggacgtcaaggtcggcgataacatccttggccgcgtcgaccccgtcaagtcgtacggttccctgtcgcaatacgtggtgctgcaacgagatggatatgccgtgctatccaagggcgtggatctcgatcgcgccgctgggctgcccactacggggttgacggcgtaccagtgcatcaagccctatgtcaaagccggtgaccgtgtatttattaacggcggttccggaggaacgggaaccttcggtatccaaattgcgaaggcccttggatgtcacgtcacgacatcctgctcgaccgccaaggtcttgctggtcaagaaactgggtgccgacacagtacttgactaccacaaggacgatatcgtggctacactccaagccgagggcccagtctacgatctggtggtggacaatgttggcaactcgccgaaagactttttctccacgacgcctatgtttcttaaaccggagggtcacttcattggcgttgggggctccccatcgctatccacggccaagaatatcgctaagggcctactgttgccggtcgcactgggtggcacgccgcgtaagtttgtttcatatctcaccaagaatgtacacgaggacttcgagcagctggcaacgtggctagctgacgggaccataacaacgattatcgagtctacctttgagtttgatcaggtaattgaggcctaccagcatctgaaggtgggctccagtgcgggcaaagtcattgtacacgtctcgcccgagatgtgagggtgctgcacctctacaaagttcaatgaacgatattcattagattcttattggatcgatagcaactgcctacttcgtgagctctgaaatcgacgggctgtattcctagttgttgtatttgcattgtttgcgtggaatctttcttacaggtatcataaagagaagctgcccatcaattgctggatatatgttgaactaggaatatggcccctctaggccctaaacaggaaccgaggttttgttatggctgtaaatttcatattgtaccagcgaccccccctcctggccagtccgacccccctttaggctatgcgatccttcctacctgatagttcaggcataagctgaccgcctaacgtaatcggtaagcgagtggatcagacaagtgagtggatcaggcaatgcaaaacgcgtccatcaattagcacttagttaattcaaccacccaccatgccaccaattcgctcccaatcctctgcaaattcaacagagtaagagggtaggatcttattagctattcaggcttttcaaaataaagaaatctcttcaatacgcgaagcagcacgccgatttaacgtccccttctcttccttacggaaccgccttaccggcattaaaaatcgccctgaatctcgcgctaacaaccataaattaacagaaatagaggaggaatctctttaaaaatgggttctctctatagatctacgtggagctgctccctatccttctatggtttgagaaatggctaatcttcttctttaatagcgcggaactaccctagttctttcggtcggtaagaaatgggtatataactttgtgaaacggtatcctctcctttcctcccgattcttaaaataatataattataagtatacgaaatataaagaccctaaaatcattagggaatggtttaatctagtttaaaaaactattctttagtatagaatcgatctagatgatatttataacttcgataagacgggttttactataggattgactataacggtaaaggttataactagaagtaaatactatagtcggagatcacttctataacctaggaatcgtaagtaggtaactgtaattaaatatataaatacttctaggtaggcgcttcctctatatatgatttttaaaggtaaagtctttattaaatcttagttcgatagcctcctaggagattagcgctttaaagtaagtctaaacggttagacttctaataaaatctaataaaattgggcttcgctagctttaaaagctctttattctatcaacttttctacggttaaagggtcggtatcggcttctagtacttaacggtcacagaagctatttaaccccttaattcgactaaatttacgaggaaaacgatattataccaatttatatactaccgcatttatcttaccttttacaaccgcttgatatcggctgttttgcggtcctaaaacgatcttatagtcggttagttgaaacgaaaatacggaataggattaactatattaataaacttgactttctcgaagtatacccttctatataaattaaagcttttaaaccagagataatcaagaatagcttcttagtagctggtttagtaccctttttacccaatagggtacttttaaaactaaatatccggcttcgaaccctaaccccccctcctagccgggatagcgattgggaccctaaaactcccttaaactatatatagttacaaaagtaagctttatcaattaaagctttacttcgtataagattaagaagccctccgagcccattatactgcgcgataaatcaagttttaaaagcctactaaatcactatgcaatccgccgcctttcttaaaaaggaagtaagtgaattacgcgctgccaatgagaagcagaagcaaaagcggacccgatctataagaacgatagtccatgaaggagatctctcagttcaggaggttcgtgagctacggtcagagccatttaaggcctaagtagcgcgtatcaacaactatcgtgagcaggtttcagaaggtttacaaccacctccccgggccaggcgattgtatggaatatgtaggcagccaggacatagaagagagacatatccagatagatgatgattttagtttatttaatttaatggcgttatggtcgagataaatgcatttgaattcaatgggttacattgcctgatccactcacttgtctgatccactcgcttaccgattacgttaactagttaactactaactaactaactataaagtttcaccactttactggccgctttgcctacgatttgcagctatttgtatctttgctagcgagaaggtttgtagtttgcaacgtttgcaaagggtcaaccatacaagcaggccgcttctcactttacacctgcttcttctttctctccatcttggttatttttgacacgtgacgtactacgtcacaataagttgaggatttcttgtattaacgaccttcaatacatagcttatagaccttaggcattaaaattgaggaaagaagcatgaaattgtgagcagaatggtacattctttactatgtaaacaagaattcaagcctacagaaaattcaagaaatgacagaaatagctgatgcctaaagtctcgggcatggggtggggtcgctggtacaatcccctatatttaaacctcccctacgtcatgatacttttccacggttggcccacttatcaagtcatcaagtgccagtgcaacatatataggtccacggggtacaagagaaggtactggaaaagctatctcgaaagactaaaaagacacgatcaggccgcatactgtactgtactccgtacctatgcaggaatgagccgatttatcacgtgattggtttaaaccacccctttccttcgcagggcgcttcatggatatttcctcgaacaatcaacataccatgttacgctgctcgaaaatattcgcgcgccctttaaatctcccaataacactggcctcgcctcgaccttcaattccagtattccaatccctttggcgtcgaaagctcagctcggtgtccttcgcgcccggcagcacaatggctgccaaccatcacgccgagtatgactggatcgaggacgtggagcaacttgaaaaatatcagcctggaggttatcatcctatcatcgtcggtgacgtgttacatgaccgttatcatattgtagataaacttggctttgggggctattcaacggtttggcttgcccgagatactcgtctggagcgatatgtcgctctcaaggtcaacatatcacaagcgattccgcgcgaggctaaagtccttaaatctctgacaccttcgccggtacattccgggtatggtttagttcctgttctcctagatgaattcgaagtgcaaggttttaatggaaaacatacctgctacacggtgccccctgcgcaatgcaaccttagagatgccgcctttagccgtcttttccccctcgatgttgctcgagcactatcataccgagtcgcacaggccgttgcttatacacattcacaaggctatatccatggaggtttgtcataaggatgactatctattttggatactagtaagctaatattatttattgatttagatattcatttaagcaacattttggtcaagctcccgtcaagttttgataagctctctatcaagcaattctacgagaaatatggcgagcccgagatgatccctatcacacgatgtgatggagcgccattaccccctaatgttccggctacggctactttgccgctattcctagggaaatatgccgagaaatttgtattgtccgacgcgcacccgcttctaagcgactttggtgaagcgttttcccctgcttcagaaatacgtcttgggcaagactgtcatacgccagccgcgtttcgggctccagaagccaagttcgaattgcaaatcccgctcgcctatccctcggatatctggagtcttgctaccgcaatatgggagattatgggaataaagtctatctttagcgctgaatatatgcacgaggatgaggtaacggctcagcaaattgatgttctcggacctatgccatcggagtggtggcagcgctgggaaggacgaccccaatttttcgatgaccatggagatccaacggagtcttataagagaaacaaatggcctccgcttgaggaaagatctgagatctgtatacagaaatggagacggaagtttgttggaagcgagattaaggaagatgagaaagctgcgtttctggatttgatgcgccggatgttatcattccggccagaagaacgtccgactgctgaggaggtgttaatgtcagactggatggtcaaatgggcattgcctgattgcgagcggagctaaagggattttcttgtgtttaatactcaatccatgcaccaatagtcagataacaaggactgatgcacagttccctgcataaactggatagcaattgagaatcggaaagtttcaaggtcctctgcggtagtatatggccaatatatacatcggaattctttgaaacgcgcggatataattgcctggtacctaacattgaagaaaagacagaaacacatcaacatcgatatcgaaacccgcgaggcgtgaaaggtccactcttctgtgacattgaattgcaacagattgacattttccaccagaggcggctccttgcacctgtttagcgttgacctgctatgtgcgagtagccgataggactgtccgtatattcttcaagtgactcctcgtctggccaaacaaccttcctagacttcggtccgccacgtttaatgccgtccgccttctccggggtatgagtagcttttgtaagagtatattcctgtttgccgttggtatacccgtgggacgccacatggtattcacgttcgagttgaccctcagtcttgaaggcgaaagtcccgtgccagccttgaggatctatgacatgcttgcccatacgggtagtggtattgtgtaacccagacctgattaataacaagttaaataaagtgggccaaaatatacatatgcacaaggctttggcggggatgggcatttgtctgtgtatcaaggtagaaaagcagacaccactaaccgaatcaatattgccttaggcgccaggaatttgtctcgagctgtcgcgtaggctagggctaccagcgatgccttcacttcggggctgatattgctattaaggtagaagaagattcgaacaaagttgactccctctaaagccgccatcgcttcaacgtccagcagaatagataaactgctttcacgccgaggaaactttgaaggttgtgggttatagcaaaggcatattccgttgaggggaattattgcctctttatatcttgctacttccctgctagagatagatggagaacttgtccacattgttgatcacatctattttttggtgtgatgaaacaagtgagcggctagagagctaagtatagaatatggaatgttggaaattcatggcgtatctgaggtgctcgttaatctcggcgctaaattctggccccaggacgtgatgggtggtttgtacatcgtactagcgtatttcaatatgtgtctaggccattggtgtggtcttaatgctattcatagtttatacagctctaatatctattaatgtactctgtagctttgaaattgaaaaattcagctgaaatctatgaacatcacaatgcttgtgctggtgaatctagagaggccagatattcacccctaaggcatcaattttcatgacccctggccaaaacatcgccctcccttcgaaaactacaccaaccacggaagtaattgctcttgacttggactcgaaatcacaatatataaatacttgtctcgagtggatctggatctagtccaaggattccgacccgcccgtcataattctgtcgaaaaacctgccccgctgtgtccgcggtgggaccagaagacgcgaacttcatacctcgaccacgtcaagaataccattgagttcagacgtatctctttcacgactcactaagaaactcctgattacacaacgcgtgtcgcttctaaaattcagaaacttctcagcctcaccgtctcacaagatgaggattgcaaccctccaattcgcgccgaagctaggcgacctcaaaggcaatattgagaaagcaaatgccttattaaagactggaaagactgtcgctgtaaatggaaaggagcttggggtcggggtcgatctgttgaagcctgatatcttggtgttgcctgagttggcgatgacaggtacgtactccaacaaactcattgagcagcatgaaccccgtctctagcatttgactcaacctgtgtaaaaatttcactggctaacgaataactaggctataacttcccttcattggaagcgattaagccatatctggagccagctggtgatggcccctctgcctcgtgggcgcgtgaaaccgctaggcgattgcgatgcaaggtttgcgtggggtatgcagagattgaaaacgattctcaaaattccgacaaagtcacatactataactcactccttgttgttgacgagaacggggagttcattctcaactaccgcaaaagcttcttgtattacaccgacgaaacatgggcggctgaaggtcaagttgagcgagggttccatgagcttgaattcggttcccagggcgcgctatcttcattgcaccagggtgagcaggttctatccgagaaaaaacggatcgcgacttcgtttggtatctgcatggatatcaatccgtacaagtttgaggcgccatttaccaaatgggaatttgcaactcgagttcttgactccaagtcccaacttgtcattctgtccatggcctggttgaccactctgagccgggaagagctagatgccttgaaggataagcccgagatggatacgttcaactattggcttcagcggttctggcccctgatacaaaaaaggatggaacatgaggtggatattgacggcggagaggcggcagattctccgaagaagatcgtcattgtcttttccaatcggtcgggcgaggagccaccgacggaggataccaagccaccggcgcggtatgcggggacaagcgctatcattgctgtgacgcaacgacccactgtcaatgttgatgcagggtcaggtgcgcacgcccccgatgaggaaagtgagacaaaggatgcgggcatcccattcgacatcaagatactttgctgggacatgctaggcgccgcggaggaaggtatttgtttcgcggatactacggcagatccacaaatggtatttgcactgaaataggcgtctgagtgaggagcgcactggacgcgtcagactattccacagataatgcagagtctatgaagtgatcgagggccctcgcgacatgacattaggaaatggcatttcgatcatccgagtttctgtcatacctcccactcccagaatatacactaaacggtgtatatctcagtttctctcagttccatggcgatcctccttgcaatgagaactccaccgattgccacaggctcatgtacaggtgatccatgtgataggggactcaaaacgtgatgacatatggaggaagatcatcgagatcgtcacaatcttcaggaaaagctcgaatacttagcttaatatcgcatctggaattgtgaggtcttatgatcactcgatcttcacgttcatcaatatgcaggcaagataccagggaagacccttttggatatccgatgcaaccctttggagatatggtggtgtgaaggtcttggggaattctatttcaatatgcttagtctgaaacatgtgattcacctctcccccaccccgatgagggatcagaagtaaatcgagaactaaaaacgaagtatgctgagattgtagaagaactcgtgttatatcacgatctagaccagcacacccaccacataatgcactactttgtttcccattgcaccaccgtcccgggatattccccttttgtgtttcctgattcagttgaaggcagtattcgatacactagccggtctagctaatcactttgcagggaaacaaggagggacagtcgcttccgatcgatgccgggtatattgaatatagttagtaggcttgtggttagtctagactacgccgctatacttgccaaatatgtgaattcatgaagtcctttgtatccgacggtctgatcccccccgtagtgggtgaacatagcccgtgattggcccagaagatacccgtacacgtgatctaggaaccccctccgagagccggtggccaatcagagacccataaaggaggtgtgcagcagaggggcacgggacggctgcacatgacttgcgttgagcgatggaggcgtagaatccccgggggaatccaagcattttagttggttatcttcagctcctgctgtcggtttcgttttggctgcgtttgcaaaattgtctagatcttcagggctcccaggtggctcattcgcggtctgcggtatgcttacgtcagtcgatcttttggaatagatcgatcaggtgattcactgcgctcttggtcgttctggcccgccggactcagcgcgactcctcctcttgaaccacctccttgccacgtgagcaatccatcttgaacttatccgctactctacatcttcctaaagaaacacgctttcttatttctaaatttaccgcgaggtagattgcgaagtattttgcatctcctgctattggcttcttcaaattttcatctttaccaattcgcgcgtctcaatttcgaattcggggtttcgcagacaacgtgacctgcgtcttgttgttgtcaggcaggtgacttcctgtcaggtgataaagagagatcatcccaaggtacggctccatcaatgccccatcttcatccagatttcctcatgtcattgcacctcgcgtcgtgatgtttatcgcaagtggtctccttcacgatgctgcccccctgtgtgacctcatctgcctgcaagccatcatgacgcgctcctgatatctgcaaccccgcggatgtctcgaggcatcgcattacatgcggtcgcttgaaacgtcactgcctcgtagaactatccccatgcactgccgcccgctagaataagactggcgatggccgagtccgacgcctcccggggatgccttacgagcgcgtcggattcacgcgtctgtttacttcgcggggtgcccactatcttcccgagggacttgatctctcaggcatcaacttaccccaggctgcattgacattccagtcatattgttctcttctcattctccgagactcgtttgtttcacttctggacactaaccattaccactaataggacgatccgctttagcgcttagcatgtctgatcccaatatgaacagcccggataatggctcgcacaagcgcaagagagacggctctgaggatctaggcgctgactcgcagcgacttaaccgctcttcccacggaagcaacggcagcatggataaccagcacaacttcggccatggaggcctcggcaactacgaccacgggcttcccaacaccggagccgaactcaacattgatcaacaaattcttcagcatgttggtccgcagaacggcttgtctgatgataacgcgttgactgccaatgctaaggccgccctggcggcacacacccctcaacacaagtacccccctcctcccgattccggcttcgatgcgagcaacctcacccaagggttgtcctttggcgatgatatgaaccagactcccatgggtggtggtcacaaccacaattcgactgctgctgcggtctatgccgcgcgcgaggctcagagtatgaaccagaagcctaccgttggctctcccgaatggcaccaaattcgcaagaacaaccacaaagaaggtaacaagaatccgtctgatcgggtcttgtttgcattgctgacccatgccctagttgaacgtcgccgccgcgaagctattaatgaggggatcaaccaaattgctcgtcttgtgccgaactgcgataagaacaagggcgcgatcctccaacgtgctattgaatacatcctgcagctccaggaagaaaagaagaacattgacgagcaatttgagaagcacagtctgactgctaatcatgccatcgctgagatcagcgtctcgaactccaaactcaagggcgagctcgcccggcgcaacaacatcgcccacaagtggctgacacgttgccgggatgccggcctggaatttgatgattacgaggagtccaaagagctagagtcactcgagatggattaagcttctcagcctaattcttctgcatgtgctacgacttgttgcgttccggaggtcaggatttgaacataccctcatttctctgttttttcaatctgctttgacagatcttttctcttactaccatggatgtttcctccagatcgatctcacctcaccatgaacttctcattactacccctcctgtttcctggaaatgcgttcccctggcattcattctgagtgttacatttcccattgactacccttgcgacttgtctgcgcaattttttccttctattattgctttcccctttgatcattctctgctcacacatttgcggtctttgtaccttactcgggctttgttctttcttttttccctttcatcattaatggattgtgggctggcgaatctacggctgggatgggttgccttgggatggagctgcgggttgataagtcctttttttcgaaactgttttattaaatctctttccttgtaggagttgtgccgtatttgtttaagcattgggataccttcctatccggggctgaggtggccctgaactcgggaggtcccgagcccgagtctcacccgcccctgtacggctctgtacggttaaagcgtcgcacagattggctacgtttaatgcacaatctataggagaatgtattggctagtttctgaactccatatttcggggctttgctttgcgtctgctagtcgaaacaccgaaatcacgggggggctccgcttccaggcgcaatactatacatggccatcaggaggggtgttcctagtatcgccgacagcatgtttgtttccttatgcttggaattaccccaaggaagtatgtgcacggcaccccaggtttcaggactccatctccttcgtgttatcccttgtctcgacagtgatgttctattaggaaagacgctttcatgaatgcgataggacaactgataatttgggcagatgtgttgtccctcggtgggtttgcatcactagcgactgcaggtgcccaaaacaagagcaacaagttctatgaatatctcataaggcgtcattgaagtttagcttcaaacatcaacagccaatactatcagataatcagccaccaaggtcatgtgcggagataacacagccctgatcagcttagatgtcgaactacccctctatgatgtcaacgcggagatccacctcctcctcttctacttaaatctactttctcctagtctcaccactacactacatctctattaactatctcaacatgccttcttcctatatcgtgagctactaactaacacatcccaaccatccacatcttgctaaccctcctagatcacgtgcaagccagacgcaactgacgaggaggtcaaggcgtatgcatctcacgctggtattcgagatacacacacgatgctaacacatgtcttttagcgtcaaggaacatgccaaggagcaaggcggcaaaattggacacgagtactcgttgatcaagggctttgcgtgagttatccagagcactctatcggtcttccagagtgagataggctaattctcggtcttggtgtttacagtgtttctttccctgacgggacagtccacagtctggactcgaaccctcatgtcgaaaacgtcgaggccgatcaggaagtgaagacacagtaatcatctgtcagatgtgagattttgcggacagcatacacagccggaggtcagattcgttagcgtgttgtatcatggcctatttgggttatgaggtataccactgagtctttaaaccagccaactacggatttatgaatagagcaaatgagctatatgattcagacagtgtgaccttgtagatcgacattactatagtagacttggataacccctaacacaggaatgaatccgttcaccaaaccaccacattaaataatatcaacagaagaaagaataaatataaagcgtccgcgctcaaccaatttacaagttcgacgcagcagtaaccgaagtgccagacacaaccgcgacatcctgaacaataacagtattgccactagcaccagtaacccgcacatcaacagtgctagtcctgaacccagcatcgtactcgaagaagttgtagtacgtgcgggttgtgccctgccacgtactaccaccgtcggtgctaacatccaacgcagtcacagcctcgttggcattaacaacctgcatcgagaaccagtacgggccggtgccatccttgttcttgagctggaggggtccgtccaggtcgcaggacacgtatgaccaggtcgtctcgatgacgccgagggatgtgtctgcgagctcggcgaaggcttcgtggaagaggtcgaggtggtcgctttcgcattcggggcattggtcgacgatctggtttgggttagatttagttggttaggacgggatgggagggatgggagggggcttggcttaccattgcgatgatggagttaccactcgggccggtgacggatacacaggtgccgcagttggctgcgtcatcccagcgctggagggagagggctgtgccgaagaggttgctcgggagggtgtagccggagaacgagcatgttccgccgccgacattgccgccgtagaaggtggcttcgccggcaatggaggcaccgagagatacagagacggtggaagaggaggtggtggaagaggcggcagcggaggagctagtggaggaggatgtagtggaggaggaggtaacagaagaggtggtagtcgaagaggaaacaatggaagtggtagaagtgctggtagcttcgacggcagcctgagtggtggaggtctgcgcggcggcgctcttcacgacgggagcagcaatggtctggacaacagcagcagtctcagttgatgcagtgaccacaactgagtcggtcttggaagctgccttctggataaatgcggtctcggcagcagaggttgacgaggatgtagtctcgactgggacaattgaagtctcggcgacaggggctgaagagaccgaagaggtcagagtctcaacaactgcgctctcaacggcagacgaggaggtagtgtcgactgggacaactggggtagcagaggccgaagaggtcgtggtctcagctgggacaactgtagactcgacagtagactgaggaggatgtggtttcgactggggcaactggggtaggagagactaaagaggtcagggtttcaacaactgcgctctcggcagcaggggccgaggatgtagtctcgactgggacaactgcgacaggggtcgaagacaccacggcaacggcagtagacgacgaggctactgtgggctcagcggagggctgagactcgatgctaaccggagtagccgtcggggtaactgcagtctccacagaggtcgccgaagaataggtatccacagtgatggtcttataatagacgctcatagtatagcccttcgggcagaatccgtcatcttcgcgggcgcgcaatgggcccgcagacacagtagcagcgctaagaagagcggccacagaggccagctgaaggtacttcattggatatatagatggaagtaaagaatgaagggttttgcaagacgaggtattgaagaccgaatgaatgaatggaagccacaggttgactcttaaaaaggacaggacgtgcaggtgcactttaaaagaatggacgtctggataaagaatgccagattcgagagaattactgttccagacagcaagttgggagtgagagcgaaagaaggtatgaaaggggagaaaggatgggataggttagatataagtctaagggacctcatactccgtaccccgtggcttgacgaactagtaatttgatcatttcatagtaagaactacacgctaaacatgaaacgaggcgtgtatcatcagccagtgcaaatgctccggagaagctggaaggggtacttgacccatttcactaggccgagttagggctagtgaaagttgtttaaattaaagagggcaaaaaagaggaaatgactggggtcaaggtaaaatgagattctgttctaaggctattagtggatttgccaaagccaatcggaaaaaaaaactaaacaggactaccgagcatcccacataatctcgttcagcctcagtaacgcatccgcactagccttcttcgccgacataaactcctcgcgattctccgccccgcgtggaccacggagaaattcagagaagcacaggtcgacgagaacacgcagctcctcgtatgtaaatggctcgccgttcccagcagccaaggctttggcgccttgtgatgcaaaggcctccttctcttccttggcgtagtccaaggccttctccgcgccttctaggaaccagtccaggaactttgcgctgcgaggtagggcgacgatttcttgagaagcttgcgcgtgcaaatatgtagccgaatccggcgaatcgccagctggatcgatgatgatgttcttcaggttctgttggagaacaagcacatcaagctgcagtcgcagcgctccattctcattcatggcgccgatatactgggtacaggcgacaaagacccggtcgataaaccgtgccaggcccgatgtgatgaaccagcgctcaacggatccgagatacgtcgagatgttggtgtcgaatgcgatgagatcattgttgagtgcgaggatcgtgggtgatgcagcggttggttgattcatgataatgtgccaccagttgtctattacgtttggggatggagtgacgggttcagagttccgcaggttaggaggattaggcccagccattgttttagtcagcatgtgaatgatgccacagcggatgtcaacatgcatcgtaagaagtgcagtatccgcaagccggtgtaatgagtggatagtcccatcaaaggccacagcagtctcttggttgagtggcaaatgaaccgggttattgatgctatcacgattgggcttcatggacccgaacagagtccatctgcgagacggccggcctgttgcagtcagactggacgactcggaatccgcggtatgttcaaccacaagtcggattctcgcgaggtgacttgcaagccattgcatgctgttgtacaagagcgaaagggaaatgacggttttcgggtcggatatgatatcgtaaggctccaaaggcacttccgtcgttcgcttgaggagaaggtcgatttccgtatcaatcagagtctttttcttgtcccccgcacctttccacagttcatcgacgacatcatgaatgtcgcccgtctcagcaaaggcagccgctgctttcagtcggacttcgcctccacggttccgtgcagagattttcgtgaccattgctttgtaccacccacaacatttgtcataataggttacgatctggtcaataagaagctgcgtaaacgcttgatcgtgtggaatactggacagcattttgctaaattcccgaacaatggacatgaatttgaccgttcctttgaaaataggccgaggggaggccttagcccaatgggggtcttctgtaaatgcatctgcaccaatgaagctaagtgtgcagagatccgtcacagtttcatccaactggggaaggaagacattgaccatgaagtcatccaaaaaggaggtcaaagtgcccatagaaatatcggaatcaacagggacgatatccttgagccgctggatgaaggatagagagggaggaagaaggattcccatattgaagacacttggttcaagcaagatcttatgtccagtacccgagttgccattagtagggtgcggagtatcacttgttgtagccttttgccttgacttggaaacaagtccaggcactgaggacttgagaatctcatccaattcatcttgctcggctttcatctcagaattatgctcaatatcggacaacttgaacattttctataacggaaagggtcagctacttgaaagtaatgagaattactggcctacttaccttattcttatcgcggttgcctgtgtattgatgatggcgagggtcattttcctctgttctagatcgaaaagaagagtccccatcggttgcgaggtagtcgtgcatgagagaccgtatctggcaaagcaaattaatatttgtaatgtcagtcaaagctgttgccttacctcgctttgcagaagtttccacaactccttaaatcctccagaaagcgcctcgcttttgattagaccttctcgatccacaatggcggcaacaacatcatgaacaattcggtggccttccacaattgcctcaaacttggcatataaagcccacaaaaactcagaaagcacgtggccccgtttttcaatgatttccgtagggagactggactgtttgtaattgtcctgggctgagaagctcttggttggctcaggatagcgagtatcaacctctccgttcgtcttatccactactgcaaacagttcgactggaagacgctgctcaattctatgaactgcgacgtcaagatgtcccatcttgttcagcgcttcgatcaataactggatgtaggagaacgtgtcggcctccgggttccgggaggcatcttcgaccataggcgtcaacggatcgaacttggccaggaaactatacacaggccgttcccaagagtgactaccggccaaatgagacgtatgcacatcttttccatcagttgtgttagctttccatcggtccgagcaatagggtgatttaaggtatagatggtcgtgcaactcctcgatcagaatgtctgtgagcgacgtttcctggttgaggaaataagcacgaatatcggataaagcgccgatttcctcaagctccgaacgccgtagaactcggagagctgtgtggagcacatccacagctgcaaggaatcgcttatctgaaatctgagtttccaatttctcgggaagggattggatttcctcaatctgagtgaacagctgtacgatatcatcatagttctgagaggacgttgccagtcctttcaactccggtttggtcgatattaagccggatttagcctgatctagggcatttctcagactgcgtactcgattttgcgaggaagctatattggattggatcttgtggtatgttccaatagaactgttgaatccctgatggtgttctatgacatgcaattttagcatatacatgtcctaacccccacagagaggacctaccattgacaattgccttcagtgtcttctggatgtcattgtacatatgcaaaaattccggttcacgatctgccttgcccaatgtgctcgtgtccatcagactcaaagcgacgtgtactgggacacactcggcatcggtcatgaaatcccagtcgcgctggatagagtggagaatcgctgtagaaggtaaccggattagctattgggccaggttgagcaaaagagaatgtcgtactttcgatggcctgggtttcccccgagtcattgctcactttggccacaggcgacgcattcctctggctcctgtgttccatttggcctcgtgggtccctttggtccctttgactccttccatctctctgatctctccgacttgcatctctagaccgctcttcccggtgcttcctgtcgggatcttgatttcttgtgcgtgaccgcgaagaggctttcgcagagttcgatgagggatgcggggaggggttcgaagacggttgcggagagggttgtcgattcgttcgatcgcgccgtcgatcgggcgactggctcagcgcaggagattggcctggcgatagatccgccggctgaggcgtgtcagcgtagaaaccaccgtatccgccgggccgacgatctgaatgtccacctccacctggtggtggtgcggcacctagtcccccgtatccggttcccccaggattgctgtttgaactgtatcccccatcgttgccatactggttgggaccggagtagccatacccgttaccataaccgctttggccgctcatcgccaatgatacctcgcaatcacggggtgttccggttcggtatggaagcgttggtgggctgtaacaaggggctggcgtggggctgttagccagaaaggttcggtcttaagtctggtgactagcgcgcgacaattggcggggagctgcgagcattcttgggtgtggaatagagggagcgctggaagcaattcagtggtaatgtggtgatagtgttgaaacacgccgggtcgggctccaccagagcttcccgcattccgttccactggccagttgtcggtttactaagaaactccgaaagttgacaatgtaaactgtagatttgcagtatatcattgtgtcgttatgttccttgctagcatcatggtatttggtatttgattaaatcttaattattcatgtctaggtacagcactgaaatggtgtatacactactgtattctacataatcccttctaatcaatagcaggagtactccgtggctatttcaaaccacggcgcatcaacgctgcataccacttatttggaaattggctgggtctcacgcttgagccatgagcgtgtcaggtcgtctgactggaagaagtgctctgtcttcgcccatatctcagcgtggtagtcattcacccacttaagctcggcgtcgctcagaagcgacggctcaatcaagttacgaccaataggagtcattgtaacatgctcaaagcctagccactgcttatcaccaaagttgtgggcagttttgacttcgcgagccatgacaatgtctataaagagcgggattagtatttctccaataacagtcacagactgtacaactcactttcgattcgaataccaaatttgccatcctcgtagtatccgggttctatatcaggaattagttttggactgcaacctacggggaggagagacaaaccatcggaaatgacgtttccggccgcaatggggacctcggtatactgaacccgagttccgataccaatgggaccctcgtggacattctaaacaaagataagtaaagtgtaagatgtttgatgagcgataatactcaccagataggagccaacaccatggcctgttccgtgaaggtagtctaagccctctttccacaagtgttggcgcgccaacacgtcaattgcaaagccactggtgcctttggggaataccgccatatcgattccaatagttcccttcagcactaacgtgaaagcacgcttctcgaactccgtgggaacgccgaagtggaatgttctcgtagtgtcggtcgttccatccaagtattgacaaccagagtcgcagagatagatggcattaggatcgatgatagcacagcttcccttctctgggctatagtgaatgaccgcaccgttgggcccagtcgacgagatagtatcgaaggagagaccagcgaacagatcatgcttggagcgaatttcttccaacttgtcagctccgtcgacttcatccaagacagtcttcttgttgactagttcattttcaagccaagcaaagtactcggtcagggcagcaccatcgcggatatggcaagctcgcattccttcgagttcgacttcattcttcacagcctttgcatccgcgaccgggctacgggtctcttcgacctgtccctcgccaccaaggctgaggctgagagcccaagaagccttgttcgacaacaaaaacttggcggccttttcacccgcagacttgcctttggtgctgagggcttgagcatcagcaaagatggattcgtatggcttgacgataacgtcttgcccgaagtgagccttgacctctggcgtcaacttgtcatcctccacgtagatctcagcggtggtgggcgtaataacagcataagagaaaaacacggggttgtagggaatactgttcggagtcagtgaagtgccaagatgcattatagacactgttcttactcggttcccctcaggttgaatagccaggcaatctcatcgagcatagctgcaatgaattagtcactttgcaggactgggttatatgcgaggtggtcatacagatgatgaatccggccttcttctttgactcaagttccttccgcagctcggccaccttttcttggaacggcttgccggcatacttctcggggtgaacgcgcactttctcgctgggacgcgcggggcgttccttgccccaaatcacgtcgatcaagttctccctgacgcccacgagggatgaaccattctttttaagggtctctgccaacttccgtgcaccagctattgaagattagcgctatccacttccacgccgaagtaacagcactcacacgctgtgatcagagatggatcaacacccacagccttgcctccttgggcttcctccgtggtcctgccaacaaggtcagctcccatacagaccatgccgcataactgtcatctcgtaccattcctgccaagtgggcaccccctccactccacccttcaagagctgccagttgttgtccaattgtttcgcggcctggttgaagtaccgtccatcagtggacagtgcagctttgctcagggagatgattgcagtaccggcggagccagagaatcccgaaatgaactctgtgagaatgttagtgtcggcgcgaatcagcggaagaggggcgatcgttgacctcggcgcgcatcacatggcgcaatgtactcggactggtggctatcttctgagggtacaactatacgaagctggtaagcacaactcgagggtttgagaatagagatgatgtcatactgtaaacatcgaccttgtgctgttgcatcaactgccttagctttgacaggcgttcagaggtatctacgggccccatatcgactgtgtatcgcggaccgaaaacggagaagtgtcttggacgggagacgggccttagcgatcgcaaagatgtccgaaggcaaactggacgggagaggagcatggacactggcggacttcaagaggttactcatccacctgttagctttcgaaggctaagcgaagcagagattgaaggcgtcagataagtacacgataagctaattccgcaggtcgtgtggactccgtgtaagtggccttttaccggtggggagacttttggccgtagggcgatctccggagtcggctacacacggcccacttggtgttgtcatgtttgcactccaatatctacacaattgtatacaaccacattgctcgtttcaattttcttcttgttctttagaggttgatccagcttgagtgctatcgacaatggtgttatactaattcgttgtacgggctaagtcaagcttgataccttgagatatatgatgctagcaatatattccgcagtgagaaggtcagaatatatatcccacgtaggaaaaagcaaataaaggagttcaatacaggaataaagttcctataaatcgaccactccaagagtacagtatgtattataatgtatagtctgctaagacttctaagttctaacatctatagttaagcatatagaggtcacgtgcatacaaaccagatgagccccgcagttaccgctgaagcaaccgccttgatgctgattggccaagagatgcaaacactagattctgcccgtcatagctcccgtgctttgtatatgtacacttctctttttctttttcacaaccacgcgcttgctaaggaaaaatggcaacctgggtgtctgacgagggccttggggccagggagtcgatctcagaagcccatattgtatgcacaccatgtctacctttgaaactcaacagctaataaagaactagctggtcaccgagctctataacccagcgaaccaacgggaccccaccagaatcaatgagatccagacgcgcctccagcaacttcagaagatgaaagatgcatgggcaattgcggattcccttctgcaaagcgaacactctgcccagcatcgtttcatgggggctcttacattcacagtgaagatcaatgtctcatggtacggccaatctctctgatctactacctcgaccgcattcttatatgacgcataatttctgacttcggataccattaggaatgaaatcaaccaagactcggccgcagagatcatgcagcacctgatcaatcgctttgttacattggtaaataatggtgaacaagccatggttgtgagaaagcttgcctcaagcttggtcgccattttcagacaccctgccacaccgtggaaacaagccgtctggcagctggctgcaagccttgcccacggcgggtatgtatccgaagaacaatcgcaaggggtggattttcaggagcggatactgccagcgttgagcaagagtggatcgggtgcactcctatttttctctattgcgctcgctgaggaggctctccgactggactctgacccccaagatgggactggagatgcctcggctacccagcgagccatacacaacattaaggatgggttgctcctggttcaatttgtccttacgaagaccatacagcatgaaaatgcagctggaaatgatgcagttgatatcgcactagcggctgaagccatgaattcatggaaggtgagttaatattggtttcggtacttccatatcgaagagtgcaatcgctaattcgactcccaccttgcagacatggctaggtgttcatgggaatcgtcaacgctctttagctgaagatgtcaataccttggcagtacaatgtggccaaaccgtcattgagatattgagggtacccagcttgagtgaaagtgcagcttctattttgacccaagcctttgaaacccgccgttgggcctttgacgacaactcgttgtggcttatttctgatattcttgccaattcgatcgtgacagctcacattgctgctgtcgggagtggcgatgaaggagcagagagcatgtcgtttgttgacctcttgattgcatatgtctcccatttgaacttagatatattcagcgacccactgacccaacaaaatggagcgatcctcacacttatccacggaattttcaaaactcctggctatgcttccattgatgatctcggaaccccacgtgtcttggagtcttggaacgagatcgcagagagtctccctgatgaactcgaagaagacagccctaggtataacttggtaaagtcacacttagccgaagttgtcctaggtctttccagcaaactattatatcccaagacggaagatttggaagactggggcgaggaagagcggagtgaattcaatgccttccgtcatgaggcctgtgattacttgctctcagcataccccgtcctcggtgtcgacctggtcactgtctttcagagaagcgccacgtcctgcctggaaactcgggactggcgcaattttgagactgccatgttctgcatagctcagctctcagaagctgtggatgaaaatggccacgctgaccagtgtctcgatgccatctttggtagcgatgcatttgctaggctctgcgcaggcggggagactgaattaccactcaaggcccgccagaccctagtggattcattcggaaagtacgaatcatactttgagcgtcacagttcattacttccgggtgttctaaacattctgttcaaatcgctcaactttgagttgtgtgcgcacgcggcttcaaggtctatattgactctttcaaaatcgtgtgctcgcgtcttgacgtcagaccttcctgcattcttagatcaattggatcagttcagaagcaagccgacggcaactgtttccaccatgcctaaggtcttggaaggaatcgcgaccatcatccagagcttgcccagtgaccaggaaaaggtacaaacgctagagagaattctcggcttttttgtgcaggaagccaacacagcacgggaagaggttaccggacccgctcatgaatttggccgtctacgcggacacctcgtgctgagttgtattgctagcattggaaaaggccttcgctcagagagcgaagtcattgatatcgagcttatcaaggaaggaaacccatatcctccatctttctggaattccggaccaggcgccgaaacccagcgcctaataatggaggccatgagacttttgattgtcgacttccccgttgacagcagcataattgaagcagcttgcgacattttgaaagctggttacactgagcgggcagggctttttgtcttccccccctccatgacagtggactttatcaagagctttcccctcggtatttccgggacagatgtcatcatggcaaccgcgtcatcatttttggcatctcacgctcggcatgcgatgaatattcgcaccgaggccgaggcgctcatcgatcatgtagcccagctcttctcttcgatgctccagactccggatgtgtacgacccagagaccgctaatgccggtattgatttcctcacacgtcttttaccaaagtactatccgatattgttcaatcccgtgaagtcaaacctgagcgcagagtctcctcttgctgtgcttcttcacttcacacttcacgtattgacacggccagaaccacttcctcttaaatcttcttctgcattctgggttgcattaatagatctgcagggcatttccccagaagaaatgaacatactcgaatccgtctatcaagagtttattccacgcttgtgctacacaataatccaccagattgccggccaatgcgcaagatcagacttggtctctctaaacgacgctctgcgacgtactgtcttcaagcagatggcattggcgcgcccggctttgaaggctgcgctcgactctttgaacgcccaagttacagatgcaaccggacaacaagtgccgcttttatcggcgaaagacaagtcacggttcttggagtctctcgtcattgctagaggtggccacaaacagtctctggatctcgtgcgttccttatggttgaaatgccgtggcatggatttcgattatgcccagtaatggggcttgcgcattgatacatgacctgatgattggagttgatgggtcctgcaacttcggagtccatttagatatccatttgcatgacatacgcggtgcaacttgatttaatcctacttaagagtttccatttgcatttacctaagcgccataatgagaattttgaaatatcgagtagtttggccacttgcgtagaaaaagacatccgacccagtgggcaaaagtcccaaccaaagttttatgctgtacctggacaaacaatgtccaaagtcccaaggccgatattgctagattcagcgtcagatttgatctttgtgatatatactgcgtgttcttgtctggcaaatagatcgattttatacagatgccatatcatgtgaccacatacccacttaagttagttagccttgacccactaaccttatcctacaacacccgtcgacagactacatatttgtacagactactccgtacttcgtctgcaattccatcactttcttcggtattatccgaacggctaaaatatttgagtagcatgtgacaagactgtttgctcgaggggacatacttcaaatacctccaaaggattttcccgtgattccccgtcatcggagtgtacggcgtaacaaggagaatgacagccgaagctccgattggctgttttccctagccgcgggcaaaaaaaaagccaatcgtgtcttttgctatcggccccacacctccggacatcgtattcgtatactacagaaattgtctttgggtcctggatgattctattaattcttatgtattgccttatcatacattgaagttgttaacatgcaattattggttttaaaatgacaaatgtatcaaatcatatcatatatatgtcacgctagacgcctactcatggctcatgtacaagatttttttaggacacaatgatcaaggctgaaacaactgacagaaaagcacatctaccaaccacggccagccaacttagcagactcgggcaattgcttgacgttgataccaaccatcgcctcaccaagaccctcgctgacttgagcaagcatcttggggtccttgaagtgagtgacggcctggacaatagcgcgggcacgcttcttagcatcgccagacttaaagataccagagccaacaaagacaccatcgcagcccagctgcatcataagcgccgcatcggcaggggtggcaacaccaccagcagcgaagttaacaacaggcagacggccgagctccgcaatctggcgaacaagctcgtacggggcctcgatctcacgggcgaacgcgcgcagctcaggctcggggtcctggctggcgaggaggataccacgggcacggctgacctgcgcattgacagtgcgcatgtgcttaacggcctcgacgacatcaccggtgccagcctcgcccttagtgcggatcatagcggcaccttcggagatgcggcgtagggcctcgccaaggttgcggcaaccgcagacgaaggggaccttgtagccgtgcttggtgacgtggtagacatcgtcggcgggggtgaggacctcggattcatcaatgtagtcaacgccaatggcttcaaggatctgtaggccggttattgttagtgatattgtgacttttatttgcctcccccgccaccgggagatctccgtttcccccctccatctcccccgcatagaggtaattttttacgtacctggcattcaacaaagtgtccgatgcgggcctttgccatgacgggaatagtcacggcttccataatctccttaatcatgctggggtcggacatacgtgccacgccaccctcaacgcggatatcagcggggacacgctcgagagccatgacggcagcggcaccggcttcttcggcgatgcgagcctggtagaggtatctgttagttttttacacactgaatagtatcaattccttgtcagggagatcatacctgctcggcgttcacgacgtccatgataacgccacccttcaacatctgagcaagaccggccttgacagtgaagtcactgccggtggatccgtttggagcagccattttgaattgtgtagctaaaagaagggaatatgaacagaggtgaagagaatgaatagaagaagtgaattagaaagaatgaaaaagaagagaaggattccaaaagtgagtcagtaggaaatacacttttccctcgaaagttacttgcctcaggccaatcacatgcaaagtgcccctccgctggtccctggaaagtccacgactctccgtttcccgagggcatccccatccgatggcagaccgcctgctgtctagggccagtcaccttgttacatggatcttggctcttggcttgacatgcctaatgcagtattgcctgatgcagtatgtgaggtacctctctatcacttgcatggcagatgacagacagcaaactcggggagaggcaccgattccgacgttgactcatcactgatattccactttatcctattctggcaggagagttgcttgctccaagcataacactgtgccgccggtctgtatccatctataaaatatggtccctactatgtactccatacacactgtacacgtacgattcagggtccatcaatgatatgtactccactgctatccctattaatgccatttacgcattccaaatgtatctcccagcagtcgcaatacacacagcatcctaacaaccttggaactaacccaacaacatctaaagttaaagttaacaataaaataagaaaacaacgaccaaacttcccaaaaagagcctcaatctttcccgaggcgggcagatccccatgagctcatccatatatgacgtcacttggcatccccatccgccaagggaagctcaagctcatccccgaccacaaaccctccgagaccgactctccaactccctcaattgcaaaagagacaagcaaaacagacacaatgtccttcaagctattcactcaccaacccgccaccctcctccgcctggggctaggcgtcggcatcggtctctccgccgcgaccatgcatcccttgtcacctttccgctccaccccaatgcaatgccagtacaccactccccatcaatacagccccagcaaagagtcagagtgggctattaatccccccgaacctgggggtctgaagcaggctcgtccgcggcggaatgggctgttgaacgcggagactatgcgccaggttagtttggggagtgtgttggggcttgttgctggtgttgggttgagggcgttctcgaaggctttggttgttattttgggtatgggcgttgttcttatcgaggtatgtataagcttctgcctcggatttggggcttttctttgacttgctttggtgtttcgctggccgaggttatgggttatagttgtgacaagatgctgatgcttcttctcgatcttagtttgctgcggccaaagggtacaatattattccgatcaatcggattcagaaatatatcaaacgcgttgacttgggtcgcgtcatgactgagaaacggcctttcaagatgagtttcggtgctatgatggcgatggcggcgtttgcgaagttctagacttttcttgtttgaagatctaacgctacctgtacatacactcgaacgacgccaagttggacgccaattgacaaggacgcaaattggggctgttggatgcccgattagaattaataaaaagttcattcgtacaggggtatcatgagtcttgatctattccacaacaaatataagggaggatctacgctaccccagcaccagatcctccagcacgccctccatttcatcccgggacagtggcacacctagtatctccatgccgcttgcatccatgcgggaagtgatcatctggtggtcgtggaactcctttagcagggtacggaacatcatctccgaagaagcgacaaactcctccgttgccttctggtaaaggagacggaactcgatgccagtttcatcgccagccctgccgccaccctctgcaccttcatcgtctgactggtggccgtcgtccagtagagtgatgaattcggtcagtaggagacggtacaggttacgcgcattctcgggaagactcttgagcacaaagcccacgccatctttcccgccgacccggcggcccttgcgtccaaggagagtgttgacctcctcgacgacgtcagcctccgctgagaacggtaggaaggttgtacagtcatggaagacgaaattgagctgatcacgcagactgatatcccacatgaccgggaagttgggggtgtcggctgtagctaggagacggatgcgcggtgttgcagccaaacgggcgaggagtgcttggttggctgcgcggcggagaggcggggcatcaatagagttgatcaaaacggtgacgggctcttcgtgcgacttgagcgcagattgtagcagctcgaggacttcggtcggctgtgcaccaagcttggatggtgcatcgtcacccattacggctgtgacgatcgtggcgaagatggatcggatggagatgcctggtgtgtaaccattgaccatcacaatagttggagtcgtagtgtctgacaagcggtggttgtaaatccactccgcgaattcatccattagcttgcgcttggagccgtagccaaataggcagatgttgaacccttcatcgaactcgaatgcccactgcgggaaagatcggtgatgcaaggattgcaggtattccttttcttctttgcacggatccacatattgtccaagcttctcgaaatattcctcatgggttaacagcgttactttgttgagggtggcattcgatgtcttgacaggaccggcgcggttctgaaagaagtatcgttcgtgtgcaggcagctcgccttccggtgtcggggagcgcttattcctcgcaccttttggtcgtccagcacggcgctttggttgttttgctcccttttcaggggcctcttctccggctttaggttctatactctccgccagcgactgatccactttctccgtatcaggcccatctccatgtaagatttcctccgctagtcgttctgatccatcccaagctgcatcttcgtcctgctcgaatagcactcgtgcactcttcttgcgcgcagaccggtctgcattcttaactcgagatggggtcgccgcgattgcggacttggccttggtaggcgtagcgaacaagccacgagccttggatttttgggtgggcgttttcagcccggactgttgtaatggcgtcgcggagacaccgttggcctttttgggtgttgattggtcgagtcctgatgggggaagttcgtaggaggaatcatcgttcggaagtgcggcgttgggcgcgtggccgttcaaggcgccattggattgttctaaagctgtccgttttctctttggggtcgaaacaggcggctgatcgccggtgtctgagagcttacgcttcataacagtctagtcagattatagtcacgtagacgcgaaggagaaaggaagcaacagtaccatcagatccggagaatgtgcacagggtcgagacgcaaggggcttccaaggttggtaaattcaagctctcgtaattgcaaggagctgcaggtctgacacgggaatgtaggactaattgggggttgattgggtctcgaagtgcttgaaggaatgaaattggagcggatgggtttctccgactccgcgtctgaggtttggaggtatacggagtactgccttgaattcaacacaattcgcgagattttacctcgtttatcctcatgtgtgtcgtctgtggtgtttctagttatttgtacgaaaatccttgatttgtactccagagagctggctaaaaaggtcgcgcaagtcatgtgagcaaacgcactgatcagactaaagtccaattgcctagatgttcctcaaagtcctcaacaagaagaagaagcaaatcaccggatattatccccagatatctcaatagcagtgggctcataccgcgcaattagttgccgagtggggagccccgagaccggctactttttctcttggcttaagtttgactcacaagagcaccactcctcataaaagctggggtctacaagcctagcaattggcatagacaggacacatgcttccaactactcaatccgccactatggctacctccctcgcccgcatgctcaagggccaagtccgatgctactccgcaccgctggacatggctattccggcctctaaacagcgctacatccccacgaccggcacctaccccaagggcttccaggtgtctggcacctatgtgggcgtcaaggcctccaatacccgcttcccggatctggcactgatcgcctccgatacgccatgctcggccgccgcagtgttcacaaccaacaagttccaagctgcgccagtgcaagtcagcaggaaaaccctgcaaagccgcaaaggcagtggtatccgcgccgtggtgattaactcaggctgtgccaatgccgtcaccggcaaaggcggtctagaggacgcagtggagatgggaagaaaagtagatgagtgcagcggtgtcgagaatgacagctcgctggtgatgagcactggcgtgatcggacagcggtaaattcaccatcctattaggactgcacatataccgcaccccattgctaacgcaacaaaccactcaccagcctcccgatctccaagatcctcgaccgcattccaacagcgtactcaacgctcgcctccacacacgaagcctggctcacgacagcccgcgcaatctgcacaacagataccttccccaagctcctctcgcgcaccttcaccctcccctcctccccagaccgcacctactgcctcgcaggaatgaccaaaggcgccggcatgatccacccgaacatggcgacacttctcggcgtgctctgcacagacgcggccgtcgagccggcagcgctgcagtcgatcctgaaacacgccgtgtcgcgctccttcaactcgatctccatcgacggcgacacgagcacgaacgacacgatcgccgtgctggcgaacggcgctgcaggcggcgagactgtgcgcgcaccggcggcgtctcccagccccgactacaccgcgctgcagggcgttgtgactgatttcgcgcaggagctgtcgcagctggttgtgcgggacggcgagggcgctactaagttcgttactgtgcgcgtgcgcaactcgccggattacgagtctgcgcgacagattgcttcgacgattgcgcgctcgccgctggttaagaccgctctgtatggcaaggatgctaactggggccggattctgtgtgcggttggttatacgcagggtgtcgcggaggggactgttgttcctgagcgtacttctgttagcttccgtccggttgatgggagtgaggttttgaagctgttggtcaatggcgagcctgagactgttgacgagaagcgggctagtgctattcttcagaacgaggatcttgagatcgaggttgatcttggtggtggtgaacagggggctgctggatgtggtggtgaggatgctgtttattggttctgtgacttcagtcacgaatatgtgaccatcaacggtgattaccggacttaaaagagatgtattttagcattgccagtggatgttgcctaatcgaggaactcatttcggactcgaagcccttttggagcgaggatacctatagttacaaagaagagcggttcaacgaagcatgaatgtgaacaaggttgaggatcatggcaagttgaatatatgattttggtttttctagacacatatggttacaagaccctaagcagggcacttttcatcgctgagcaccacctatccagtaagattagacccatgtgatttcacacatggacgacctaagacattgacactgttgtctcgatgtgcagaggtccctagagaggggcctcggagcgttcatcggcaggctgatcaacctgcacgactgaatatcaatcaatcggtatagttccaattcagccagacagacggcgccaatccattcacccaaaaaagtatagcggacgaaaaaaaagacaaaaataaacagagatgttgcaaaggaccggcgtgatcctatgtcatgctgctcgtgaaaatacggacagtctctttagctgccggggacgaggcccttgaggccagcgccaatgtcaccctcacgggcggcaatttcgaagtagccgtaaatgatgctgtattgagctgttagctgaaatgaacacaattgatgtatcaacgaagtaacttacgtgacggcaagaagaataccagtaccgctgccgagggcacccatgaggtcagaggcgacggaaagaccaccaatgcaggcaccaccgaaggcagcggcagtagggataacgcgcttcagctccttgtacatgctctgctcgcggtgaccagacatgacgagaccctggtccttgagctgcttggcaacgtcccgaggagcggagccggaaacctcaatccaagtcttggagaatagggcgcaagccacaagcatgaaggtgatgtagacggcagtgtgaatggggtcgaggagagcctccttgaagttgagaggaggcgacatgtagtaagcaatacccgaggcggcgtaaagctgagcagatccctcacggggctcccaaactccgagaagctggaccaggatgttctccgagaagcgcgagtacagcatctgactgataaggaagatgttggagcacagagcggactggagcatgatgggcatgttggaggtgtagaagaggcggacggggtatgagccgcgcatgccacgctggcgggaagacttgacggggatctcaacacggaaaccctgcaggtagatgacagcggcgaagacgaggagagtagccaggaggttcatgacgttgggcaggttctggcggtagaacgcctcgtacagggcgcgctgcttatcgggccaggtcagaagaaggtggaacagagcaataatagcaccctcgaactcggggccacggccggtattgatggttgttggggagaaggccttccagacaatcgactcgcaaatgttggtggcaatgaacagggagataccgctgcctagaccgtagcccttctggagaagctcgtcaagcagaataacaacaagaccagcgacaaccagctggacaatcaggagaacacagataccggcaccgagatcactgggctggccgtatagaccagtcagaacgtaaacacaggcctgaccgaaggagagaatgatagcgaagagcttctgggcggtctggtagagctcgcggtcggtcttcaagtcgaggttgacatcaatgaggtgggtaccggcaaggagctggggcacaaaatatgtcagtacaatcaccgcgaagaataacataggagttttttggagtcgcatacctggaagaccatgccggaggagataataggggtgatacccagctccatcagagtaccccggttactggccagcatcatacggagccagtacagggggtccgaagtatcggaggagacaatgccgtaaagaggcatctgactcatgaccaagaagatcatcaaagtcaactataacgtaattcattaggacccaagtcgatttcgcgcggagagggcagattcagggcgacatacaccagtccacatcaacttttggttgaagggcaccttagtctcaggagctgccacctccgggaggaggggcgtaaagggcttgatcaagtcaaggaagcgtactatattcctccatcagcatttggccttcaattgagggcgattcgagacggattgtcgggattgcgcgacgaggtttcgggggactcacggccgctcatggtggctatcttcctcccagtccgttaaagaagtgaagaaagctggagtcgaaaaccagctaaaggaatgaaagtgaatattaagagaaataaaacaaaaggagaaagggtgaagttgtcgaaaggatggggggaggagggaagaagaggacagaagaggtccgctggccacttttcgcttccgcgctaattaaggccacttggtcttcgccgcaacaaccaacttggtgactcaaccaaaaaaaggaacggggtgatttggagagaattgcactactttgagcttcaattcaattctcaatgcatttctcttctgctagtctttcaagtccgatgtgttgtgcaccccccaaaacagggctccaagctatccccacactccacagaggccacggtactaactacgcgatcgggacagctgggggtctacaccctatggtgcaagatatgggggtaattattgggaatcataatagcatacatgtccaaatacatattccgactgctttcatcctataaacatgtaccatcattctataaagagtataatattgccatctttcaaggcccaacaagacccaggcaatcatcaatgatcacctcgagctctcccagtcgattctttaagccgcggttctcctcttgcagaacacccatcacgctccaggcctcggaagcgggcacgccatagcagttggtgcaattaggcgcgttactgttaccaccagcgaaggagctacctaaacgcgttgaggcaagacccttcaagacccgatcatatgccgagcgtacaggtggtggtgtactcgtggccgcgactaggttcttctgtgctggtgtcgggaccgtcggcgtagacagggcgatctgcgacatgttgggagacggcgctgtcagagcggaggtcggagattcgacaccctcacgcagcgagaagatgctttcggcgatgctctcgtcaccggactcgaagcccgagtcgctggtgaaggtgctatggctagcacgcttgcctccacgccggggagtttggagcgccatggaagctgcgtcgtcatccggatacacagtacgaattgcacgactgcgatggcgcgattcctcggtctttcgcatttctctctcctcctctagttcctcggccatggccttcatagctttctcctgatcgagcaccttggcggccatgccgtccagctgcatcttgaggtggtcaactctggcgcgagtctcttctagctcctcctgcttttcgttcttgtctgccaaagcctggtgcatggcaaaggtgcgttgcttataggcctcctgcatacgtcgtagcactttgtccgcatgatctcgtagggaatccagtgcctcatcgttggtatcatccgtttcgggtagtctgagagcggcagtgatgtccaagttcaaaaactcatcatctgctggctctgggaaattgggtttgctcggttgtcgccgcaggccgaagaatgaaaaccgattcgtcgaggtcgagttctgcctcatatgtgacatggatgcagctgggcgggaatccaatccggtcccatctgaagcacctggacccatattaagccccaactcgactggatctgatttcccctggaaccaatctgacaagaccctggctcttgcttcaagcttcttcttcggaaaggtttcggaccaaggggtattctttgggtttgatatcgtgccgtcgatgccctgttcgaacagtggaggccttgcgatatattcggtgtttgctcgacgatgcgaaggcggattgttcaactgatttcgtgcggttctagggaccgacgatcttgggagcgtcaaggcaacggtctcgtgggggtgcgtgccatcggaatgcagggtgacaggcgcatgagtaagatcgggagacatgttctgaggggtaatttcgacagatacacggacaggactgaaatgccacgtcgattcaggcccaatgtggcgttggtgtgcgacctaggggggaggggtttgcggtaggggtatcaatgctgatcaaggacaaaacagacccctggaatatattcaaggtcaaacgaaaaagggtataggtggtttcaatgaagctttcatgtttcacagggttgagtgtggatttgtctagtgaaaccgagaagacgcctcaagagtaggaaacaagaagacaagaggctgggacgatgaaatagcggtggctggtctggagctctctccaccttcgtgatccaccacgtcttcctttccaatctgattaatcagagcaatgagggttgccttccactagacttatttcgagctcgatcccgtcatctatttttgccgctcccgctgtgcatgctttcagctgcacgaggacctgcgtcattgcacgtttctgcaaaatcctagcgtcatggctcccaacagtttgaagcatttatctaacgccctggcgacgcccgatcaactgtctaactcttcgtcctcgatcgacaatgtcccatctgacctcgaaacctctattcggtgcgcgggcgcccagctaactcaagccgctggggtgctcctacacctgtcgcaagatataattgcccaggcggtcgtgatcttcacgcgtttttggcttggcgctgatgggggtagcttgcgaatctactcagtcaaggtaggaccaactcgaggaatcctagccaattcagatccactgaccggagcaggatgtgtccgccgcagccttgtacctgacggctaagctttccttccaaccaacatcgccacgctccgtcctcaacgtctacacattcctcctatcccaagacgcgtcacccttgtggtttgtgaaacagggcggagctccggagacccctccatcccccgaaacctatatcctgtccgagggaggctaccagtccgcgcggctagtcctcctccgcaccgaaacgagtatcctccgtactctcggctttgatacacatgttgctctaccacacaccatcgctttgacctatcttcaaactttgggtgtggtaaagcccgctgtggctcgacgggtcatccagcaccttaatgcggcgttgctctcgccccagcttctttatgtcacccaccaaccaaatgccctggctgtggctgctatctaccttgcttcgcgggaggaggaggtcaagcttgtggacggcgagtggtgggaagtctttgatgtcgatcgcgaagagctcggctttttggttgtaggtatgaagagtacagaaggtttcatgcgagcggaggtcattcggtggaagaacaaagctattccaatggtagtagatggagtggatgtcgaaattgagcgacgccgaatgatggaggagggtgaatgaagcgctttgattttgctttgattttgccgagaacatatattccaagatcaaaagtctactgggaaggatgttctagtagaagctagcaagctatctactagaacattcaccaaggatggcaggcattctacatatcggcagaaggcctcacagtcaaaatgcttgcgatatcctgctccgcgccaagaaggaattcaagcaacgacacccaacactaaaccgccttgtctctgtggtggccaaacaggcggttggaaagttagctgcttccacggcttagtcgattgccagggagctctgcgactgtcaagctgaacctatatgttatatatatcttctcttgtggccgtaacaatcaaagtagatgtatgaataatatttcagaactcagctgacaagatagctagataaattgctgatcataactgaatgatatagatgcttccattctactccatctgctctgctcgagaaacaccgtcaacagcttattgatgttgtcctccaatcggcgctccacattcaggacatttccatatccattgaaaacgtcaattgagctaccctagccccggtcctgttattctgttcgggtacaggtactatggctagaacaagactgcggtgtgcacttgcgactacattgcgaatgacttctattctgttttcaagcgcctcgaggtcggccttggagcatatttcggtcattttgtggactaattcgtccaatgacccgagaagtgaagggaggtcatcatggaagtgtgcccgtcggaccctgcgtagaagctgatacagggcattcaacagcaacttcaccatttctggagtgacaagagtccaatcattgtcatttcgctcacagctgtttatcatgaaacgacaaacgctttccaaaaacccgattgctcgatctcaactcgggccgccgaaggttgcgtacatggtgccaacaaatgaatcaacggagagacaatccaagagggaaggatgggtaatggctttgagaaatggctcaacgtagacaggaatacggcgactccaatcttggccggtggtatcaatagtttccaggaagaacccgtgtccatcaagggcatcatccacgaggtatttgacaaggagctgctggtcccctgtgtttccactatcaagtatctcaaccgctccttcccacagtcgaaggatctcttcttgtcctccccgggatctgacaccgatggaattcgttctcaggatctttttccagtcaatgtatcgtttccgggtgctcgaatcatcagtcgtaggattaggttcagatccgctagctcttgtcaggtcgtgagagaacttgcaggtagagccgtaagtgcaatttccacgctagaatttccggcagagtttgtcgctttgatgacgggtcccgaagttattcgacccgcctcgcttgctggtatggccttcgcctcggaatcgccagtttccaccgtcagccatgatcgtaaaggaggtaatctgagtaagtagggaaaaagatggcagtaattttctagagaagtaagttgctggcacctaattatatggtacgggttatagctaatagcctgtatttgcgaagagcaaacgccgatatgcatcgtccctagaatcatgtatcttgtttccgaatggcgaagcaatcacgctcgttcccggtcttaacctcatgtatacagacaaggtactgattcttgcaccgctatctaggcgatctatcctcatgtccatacaatgtccgcatcgtggccctttaatccacgagacctgcctcaatctcgctaccaactccctcttaatctcgtgcttacattcaccctcttctacatttccgagacctgtggaaaggagaaaggtacattctgcaacccctattctagcgtagaccgaattttccatggaaggtttgctaggtcaagtgactagaaacggaaatgaatcagaagatatatatactctgtatcgctcgtcacgttaacagggcctccggaaagtgacagttttacataagcagatatcatcacgtgccaccatatcggttcagaatgacgctcacgcggggcggatcatgtgctccaccgcttatcatttacccccgccgcttcttctgtaactcttccttcaccttcacctgtaaaacacaatgaatatcctgcactccacattgtcaacttggcgggaccgcctggccccggtatcacgcacttctaccttccgtaataccggccaaatcactcccgaggagtttgttctcgccggagattatctagtctacaagttccccacatggtcatgggccgacgcatcgagtccggcaaaacgagtctcctacctcccagatggcaagcagtttctggttactcgtggagtaccatgtcatcggagactgaacgacaactttgccggggatgcaggactcgaggatgagattgtgagggatttcctatctggcggtgacggcgaaggcacaccggatgatggaggggatggatggttgcggactggcggtggccgtgatgctggggcagaccatgataagcaagaagctcggatccgtgacgtgcgaaccgttgatgaatccgggaatctgggcgagcaggaggaggaggatgatatccccgatatggaggatgaagacgatgatgatgaagccattatccgagagaccgataatcattcagggacacagtgagtgctattttcctatcttcaacatcacctttctcttttctaaccgtgacttgttatcgttccagatctctccgcacctacaccctttacattacatactccaacttttaccgcacaccccgcctttacctgtccggctacttgtcgccatccgaaccgcttccgccacatttgatgatggaggatattgtcggcgactacaaagacaagaccgtgacgctagaggacttcccatggttcgagggcagtgtcaagatggccagtgtgcacccatgccgccatgcctctgtgatgaagacactcttggatcgtgccgatgccgcactcaagcttcgccgtgacaagctcaaacagacgcagtcgcgcgaggaagcgaaccgcgttcttcgggcaggcggcgggctggagggcttggtggatgagaccaacaacctgtcgctcggggactccaacaacggacatcctggcggggatgagtgggagatgctgcaacacgacgaggaagaacaggtcgcgatccgggtagaccagtacctggttgtgttcctcaagttcattgccagtgtgacgccgggcattgagcacgactttacgatgggagtataatttctttgaattgatcaagactcgtcctatccgatctttctatattcctgagctaattggattggataatggctgggatctggcaacctgtcccctttcgaaatctgatatgcatgaccttacatgagttcggcgttaatctgcttctaggcgcatggttaatatcctttccccttccttgggttgcttttgctgtatattatgttcggtagcttgggatggggttcccattgcaattttactacaatttgtgagaataccagagtagacacatcttattgaggtcatatcatagtcactagcattcgaagtaagaccacggggtaccgagaactgagctcgggatgaacaaggagatccatgcattatatcctactcatagatgtatgtaatgcgactatactcaaatttgggcatatttccagctctttgcaattccatcaaatcaaaatcacaacaatcatgacctggcttgtcgactgctttatatataaaaggaatgatgtatccaggcactgactgacgtacagagaggcaagagcgaccttgagggtcagtggcccatttgggaaggtacgtgttcctgggggtataaaagggcccctccccccatttttcctcttctcttcttctcctctccccatccctctgaccatcatctctccgtagcccccatgagacagcgtaggcagagggtgccgtagcacatgctgcttgacctaccacagggatcataacattaccttgtttgttatgaggtccatgtaggtctgcatcagatatcaaaccgggcgttctcgtggatgttcctgaagtcgtggctctcattgccatttgacaagtcccacagaatacatgaggggtgtaaatcttcgtagccgaggacgcgaaggtagtcaccactgcttcacctaccacagggatcataacattaccttgtttgttatgaggtccatgtaggtctgcaccaaacaacaaaccgggctttctcgtggatgttcctgaagtcgtggctcttattgccatttgacgagtcccacggaatacatgaggggtgtaaatctccgtagccgaggacgcgtgggttcgagtcatcgtacactagtcacctaggtacaaggcaaagaattaccttatcggtgttcacattgctaagacctagatagactgcctagagcatctcgtgcgttgaaaatgatgcctggctatccgactgctcgtttttcgcccacagctatcacaacccatttttggattagggtatcccgagctggaatcactgtgaagcattcatgtgtatacgaatcgaaggacacattcatagggaaagtccaataagattgctcatgcgaatggatgctggtagatgtgaaatatataatgcagaggtaaaaccagggttgaatctgtcaggttctgcatgagtcgttttatgtgagttatgagatatatatcttacagatttgaacctcggatatcatatgctgttcactccacttgtacggaaaccgtgcgaagtctcgagcttcctaatgcagtttatattatagcttactctctggtctttgctaccaggctttccaagtggtctgtttattcaggatcataagatctcgggacactcactacactaggtgatcttctgagcatatattcaggcgaaattagagaatccaaaatctaccaggatgtgaaaagcggcggtgtatcatcagagtaatatattctaggtgataataacgatatcaaaagccgcattaacaagagacagcgaaccataagaaccccgaatagtgcaaagcacacccagacgcccaagtgaacaaccatcagcagcagtaataaacaagatcagaaaagagtaagtaataaaaatcggccctcacaaacgagcacagaagatacaaataatccgtgggtgagtacaccagccgacgaagacaaattataaaaagaaaaggaaaacaggaagaatacagtcgtgaaaaacaagagatgcatgcaaaggtccgatcaatcattagatagacctaccacatcgttaacagatggatgggtggtttctatcctggtcatttccgccattttttatcgtgtacgtctgatacaagcaggggcttagttgaagaaagccaggataatggggagagccagtgcgaggacggatccggggaccagagatgagccggcgttgaagacgggcgcaacgggtgcggagggaacggcggaaggtgaggccgatgcggtgggtgcagcagggtgaatcagagggatggagacggagggggcccaagtagccggggcggtagtgagaggagcgtagatgggggtagtgaaggtgggagggaggatggtggggacgtcagaccaggtaggagggttggtctgagcagggggagtgacagtctcggtgggagtagtggtagtggtggtgggcacgacaacagcaggggtggtagtggttgtgggaacaacgacgatggcaggagcagtagtagtagggacgacgacaacgggaggctcagggcaagggtagccgccctggtggtcgtgaacgccattgccgacgttgacgctaggaccgccggggataccgacattgacaccggcgccggcgctgtagtcatcacctgagccagggccgcaggggccgcggtggatgtcctggaatccggcaccggcgttcacagagggaccgccgggggtgccaactttgacgccgctgccagctgaagtctcgctgttgtctgggccctggtgggtggtctcagggccgtggttgacgatctccgggaatggggcagctccgagagcgggcagctggggagcagagaggacggtggcagggccgagagcaaggacgaggcacacgaggccggagaagttgatagtagcggagaccattgttgcggtatgattctttttgttgttgttttggaagaggaaagtggttgattaaaggcgagaactgaaagttgatgaaagagagttgcgaaagagagatgagggaatgactgtttagaaactgtgatgcttgatgaagaacagaagaggaggcgtgaacaatgatccttatgtacttttcgacatccatataaagtgtacactcgaacagtatggtaaggagagccaaggctatccaggaccagggagatcgctgcaaggtacgaacttccttggccttaatcttagaaaagccacaaggtcggtgatctgcaaggcacaaagtcaacggaagctaccaagacaagagatcgtgagagacatcatgtctcaaaggatctgaaacaagtaattagcggaaattagggcatccgagcaacatggttcgatagtaaggagctgcagctctgttgagagactagatgtgcctgagcgagcagcgcaaagcttatgcacgagctctaactcgagcctctgagctattttagctcagctaggacagacagtattggcgggatcctgtatgggatgtagatgggctgctatgggagtacgaaaacacgtgccgaatggggaagaaaggttgtatggatgcaagggataatagccaataaggcacagagacactaagatccctctctgctagagactttccaaggagccaatcaggacattggattaagattgagtgcaaaaataacacgcaaggcactccaacacaggtgagttcaaatgcaacttgctagggctgttgcctgttgcctgtcaagtcaggtaaccccagaaacgaagactgaaagaaatccgaaataattgaaacaaatggggttgtattgcacatatcggcatagatcataagctcgtaaggtatttcgccagaagggagaaagaagctaagaaaagcacagcatcaaaaggatgctgctgagaagtatagaaaacatgaagaaatgcaaaatagacatagtaggagttcacacatagaacacaaagatccaagcatagatgggaaatatgtgcgtccttagacttgacccgggttcgatatcccgaatgcagtgccgaaattagttgattgcttgaacctgatttcaggctgttggtcttggtcagggaactcagattcagaatcagactcattaggatcagccgactcaaccgagcttcccaggatattttttgcttcaactaggagtttctgattcagttgatctaaaaacatggagtcatgctcctcatcattaatcaaaccgagaggccccttcaaaccggggtcatctggcacatccggaaagtaggagaccttattttcggagggttgatgaacttccgttgtcacgggcgcaagaggggcgtcctcaagctcgggggcaacctcgaggggagaccccggctgggtggaccgactatcatcggcgtcgatgatcgccatcggggtgtgacctgcatggcggagcaagttctcattgggcgggccaagctctgacagcttcagtctgagactagctcgatgttccataggaggccttgcagcggcggtagggggaattccaggggaggttcccaggggcgatggggagggcggggtgatcactcgagctactacggcaggtggcagcgccgtggacttgagcgtgatgccgtccaaggttctgtcaagcttttcgatcggcaccggcagactcacagtcggtccagaagcgtctactggtcgcgaccggggcgagagggcccgatcaagggatggtggatccccactttcggatgttggcgatagatagctttggtctggcgattcatgatcgaagaacacccttgttggccgcgtgcctggacttgatccctcccacacctgcgctgcgaagccacttgtgttgaactgcggtattccacccgcaagcacatgtttgacggcttccgatcccaattggtttgttctgttcccgtgactcttcacgaacacctccagctcggcgatttttgatcgcagcagcgcgcgctctttctcccacaaccgtcgttcctgtgcgaacaattctctctccgtctcgaaattcacccgttggctgtgaagaagcgatcgcgattggtcgatataggacgtctccatagcgaacgaattcaccaacaccgagtcttgcaatgcggtttggccgtagcctgaagggacatgaggaaacgtggctgaaacggattttgtgcgacgtagtggttcggtcggagagaagcgcacttctttgtagagactcccatggccgtctagtagtttggtggacttcatgtctgaaatgtgggtttctctcggtgggcgcaaatccgcagataagggctctattagggataaacacgctagtagcgtgggatagtccagtgcccaacctgcagagcttcggctttccacgtcgagaccagtcgagttcctaaaagcggtcaatgagttcacgctccatctaatgggatttcatgcgaggttcccgatatggcacatgtcaagcctgcggtgaatggacactggttgggcaggtttgggatttgggtagcttttaggtatgaaggccccatatgagagggggagatgttagactagatcgtgaatatccacacagattctggggaaatgcagttacaggaaaggggcaaaagggaaacacctggccaagttccaaaaagcaatgtgaatggatgcatctgatcacattttatgacgtcaaaggggctggaataggcaatgtcattaataagatgatgtcgggtgagtcagaagatgatacattaagttgagagtatatcagagccatctatgtaagtgatatataacaggacaaccgggcaacaaacataatagatccgtctataagctgccatggaccaaattagtataaagaagaatgaaagaagaaaggagagtgtcgaaagcccgcccaacgccgtttgcgccaaagatgtgccacattagccattataatcagcgctcagacgtcatgacgcaggctaaaagatgcaaaaacaaaaggatatcaaaagacacaagttgtaaaaggagagggaaatccctcagagaacagacgaggtgggccgcagccggcttggcgccatttgcttcttgaaatccaaagaccaagcagaacaccccttaatagaccgatccgactgtctcatcggcgaccgactgcgccaaacaaactgctgcgcctcgtccagcagatgctgatcgccagtcggcagcggatagaagctgacatctttgcacaaagcgccaaagcgcgtcgcaaggtcaaacaccccccgggccgtgagatcccgaccacccacgttcgcagacggataatagtagcgtggatcgagataaagcagcacgctattccacatcggaagcttctcggacagaagccgtcccgcggcctcgtattgttttagcgtgcgcttcggcacgccggtctgcgtgtgcacgaagaagaagatctcgaagccgacgctgcggatgcgggcgcgggcggttgcgctgagcgtgtccaggaactctgctaatcggtcgagattgaaggagttgcggaggaagagcgtgtgtgttgagtagaggtagtcttcggcttcgtcgtggagctggcggttcaccgctaatagcttgcgcgcggtgccgtcttcgccaacccagtgaggactcattgagattgcgcggtattggccgcgagctgtgaaggtgttgccgtgatcggcgagcacgatcattggtttgctgactaggtaatcattgggtacatctagtgcatattcgtagatcttgagccggagttcggctgggagttggaggagccgcgatggtgatgtcgatgttggagtcggagttggcctcatagctgcttagctagaagaaagaatgaatgtcgagcttcttgcgaaatgcggctgttgatccgatttaaaaggcagtggtaccactcgggtgtatacgtcgccaccgcgagaaatttttcgattcgtcggaaaaagtcaatgcggaataaaaatagaggtctgtactttggacacagtactcctagatggccttgcatcccgagaatgcaaagaatcagaccatgccgacctatgatacgaggtgccgagtatctgatcggcatctcgatgcctatagatatcgcagccaccacgtatacttcaccgcatgttacatcccgatcaagctacggagtacagcaatgagcttactaggatactctaggcgacttttcctgggtatgctttaccggattttgatatgataaccttggaactttggttgtatgagtcaaccaatgttgtccttagtgacggttttaggatccgatgttcggagtataaaacagtcatctgcctttcttacattccttcttgctttagacctgtgactagctctattcgatatgaggcaaggagaaacaacgccaagcaacgttgaggattttcccaacacacgtgcaatcgatttgctctaggcctcagtcctcctaggtatgtaagaagtagattgccatggacccatctctgcaacatgcaagtatgggtcgagtataggaaaagatgatgcaaagctatcattcattgtgccattctctaaaagtaattctctttgctctatattgtagcgaatgttcgtaccttccgaagctatacatatatacttcgtacagatgtcaccgcctagtgatatctggcgaatcttcccccaaggcttcatcgtctgtttcaaggctatgaagcacattaatagtcattctacaaccataaactttaaattagttaatgccggcgtccaagtctcattgccgactggatcgaaaacatatccgcaaggggccaatttaacggtatcagcagccatccaatcctaccagtcagttctactgccccttttctgtagcagactttgctagcgatggaaagagaaacagcatagctaacctgatacggaaagatggtgcgagcccaggcctatcaggctctttgggcaggaaaaaatgcccagcctatgtatgtaacccaagaactatagttaccagtagtcgattggatcatccacggccaagtaaaagccgagtctccaatctccaaaaattcaagatgcaatctatttgctatggaaaactgtccgaaaataggaataatgaagttcccggatcatcgctgtctatacacacccagcgaccaagctgcccgcagaacagccagaccccaagccatgccgatactatctcgtaagacattcaatttgctacccttcacctccctccacccgacaggaacctcagccacagggatccgagcgaactcagccagcatgagcatctcaacatcaaagatccagccttcggaatgcatatacggcacgatgtaaggtagggcactgcgggagaacaacttgaacccgcactgtgtatccttgacagtagccgttttaggaggcgtcataagccacaggatcaaatggaacgaatgcatcaggaagtttcgaagcttggatcgctatcgagcagtcagtaatcaatcgcaagcctcccacaacccacaacccagatatcaaatccccataccttaaccacagcctcactcccaaccatatgcgcccgcgacccaacagcaaccgcgcgtcccttcgcatcctccacatcccgacaagccccaaccagcttccccagatccccgaacttgctcgctccatccgcatccgcaaagacaacatactgcccccggacatggcgcatgccgtgcgtgaccgcgccgcccttgccacggttatgcgtcaaggtcacgacgcggatcgtgccagacgggatatgaacgccctctgcagcctgcggcgtccacggacccgcgtgtcccttggggtggagagagagctggtggtcgcgcgcgaagcggaatgccacttcctccgtgcggtctgtggacccgtccgagacgaggatgatctcccagccgcggtctgaggccgagcccgcgtcgctggtggtatccgcgttcggcttgcgtttgcgcattgagcgcgtctccattgtaactgggctgctggccctggcgagggcgctggccgtgtccccgtacatctgctccaggtagttcacggcttcctccagcattccggtcaatcggtcttcctcgttgtaggctgggactacgacggacatgaatagctcggccggtgcgattgtgtggggtgtgctctttttggtgtggctttcgagccagcagggtaggggttcggggtctgtcacggatccatctttggcgagggttctatactttttttcttctgggagaggttttcgagggactggcgcaacgaaaaatataaatagtgagaactatgcgatagcaagctggtcagtaactttcaattgggctgcgcgtgtctggagtgcctccgcgcgatctggtacaagcggagttgggtaaacgtggactcaccaggacaaatagtcctagcaaagtaactagggcagcgacgagtaagatctggactgggatttccaccgcagtattgacgcattggcgacagacctcgccccaagctgccgccattgtagagagtgacgaattggacgtcagatgcggagacggaagaggtgcggatagggagggtgagtgatgcccgaagggagaaggcaagcacttaggtcggagagagaaagtgtttattcatagaggtaaagcagaatgatcctcgccatttgaaaagagagagggcgcagaagggaggggaggaatgttgtaagtcgatagtcgccagcttgtccttttatcagcagctcaacgcgcaagccaatagatccacatctaggagccacgctgcgtagacgctctatttttacagtgttttacttattatagcttctattataatctatttttcatattctgttacggttcgcgtatattgtagcgcatttacctctttatacgcgtttaccgcgaatcgcatggaccggccagcttgtagaatggacattggctcataagagctgcttcctgctctatcacattgctcttttcttctaatatgcgcctcgtgatgttctccaatgggcaaagctagaggactgtctgtagcaaaagaaattgacccggagagaacatgatcatggtgcccgaacactctccggccatgcctatacaccctccataaaacagcgtgagtaatgagacaggggagaaggacaaggggattgacactgaaagcttccaattttaattcaaatacttttgttctctcatctcatttttccttcttcctctcactttgcctccctagtctttgcgggagtactctttgattctcgcaacaatcgttcgcccaactggcaagtttgaaacaacgcatcgagaagccagggatgacttcttgctaatagctctgaatgtgctccttctggatagaagaagtccgcagtaacccgagtccagaagggatcgaagcaggcctcttggcttctaacaagaccaatccaactgcggtggaaacagactagaaatgctggccagagttggcgaatagtatggaatcagacggacggaagagcattccggggcagggatcctttccataaatatggcaatatatgcgacaatccttggacggtccagtcattgcagagaggttcgtatggatgcaggccttccaggacagaaagacccgagttctgatatctgtcgtgaatgtggtctggcgactcatgaatttcctgtctggtaataacgcaagataatggtccctatctggcttcgtgtacggaaaggacagagcgaacgatctggaggcttgagcactccatttcgaacaagaaaaaaaaagaaactctcaggtttgaccagcgcggacccgtcaagacgcgcagccaacgtcgtaacggaacccgcagcagtcacccagccgcattttcaaacatcctgcatttcttgattggaagaggatagctcaatatctagtgagttaggattgccatagagggaagccggtgattctgccattgacgcaaattcctctgctaatcgggtaggtgtgaaccgtcgcgtctgatcgtatgtcatccagcgggtgaactagtatgatggtcagtttaactgtgctgataggaacaagggagacaaacagttgcgatccgcactccaagccaaagacatcggtgttttctgggaatgactgctgaaggttcttctgttgatggtctgttatcttctgtaagagccccctcgaagaacccttctgggtagtaaagccggctccatgcctgtcctctgatcaaaaagtcctctgggagctggtgtgtagttgaatcgccaagaagcgggaatgattcgtctgcgatcttcgaaatgatcgtgtcagagccgaataaggtgttgagataacttgcaagcagggaccacggaactagcggttctagtcgttgtatagcagctgggttgagtgtaagagaccacacaaatgccatagagatatgcacactcgggtagatgttgggatcaccgacttgcccgagcatcacaattaacgtgtgaaatgcgagagagctcgcccggaatgcaagctgagacgacaggtcgctatatgtgtcgggaacgggtgtgttcgtacccgatgcccacttcattgccgttaggcgttcttctgctgtaggattgcgcgacttcaatgtgaaaaatttttccatcactccatctttactcccatattgaagtattgcgcagatattgcaagacgtgagtaggacacctttctgcccgcgcacccggttaatttccttgcgtagaatagtaagaaaaaccttctcccgagaaacgaattcctcaaccggagcttgcatgaaaagcgtaccgtgagtagtcacgaacgaggtaatcaaatcccctttttgagctggcatattcataagaggagtgaccagctgaatcatgctatcgagagcatttgggaatgcgcgcacgctgatcaatgctttcgtgtagtgaaagaactgctgcagaatgtccgggcgagctagaatagcaagatggtgctgaatacggccattttctggacttccgtccgcgtcctggttataccaatacctcgacactcctgcccagagttcacggtccttcttgtcgaattcttccaccgccatgcggtaccgtgccaagtcacccaagcactcgatccaggtttttctaaagtctggcacactttcaaggagcagcgttatcatcgagtatgagagataaatgaagtcgagcataaactccatcgaatcggggagtttctggcgtagcagctctaagaatgaatgcacgccatagcgccacatgcgcgccggcatcgcgtacttctcagctagctctttaagaacaggaccagcagacgggtgccgggaggcgaggaaaaagtcatgatgttcgtagagtagtgttcggtgtagcgagacgagtgtctgccactgaccctgtgatagcttggcattcgattgcgcctgttgtctatcggtttcgatgcacttcttttccacattgacaacgccggtataaatcccccgcacttcgttaatcagttgctcctcggtgatggtgtgcgtctccagctgccgaaacattccatgcggttttgcttcctgactgactgcctctgccatcttcacattttgattcattatttcgtcatttttcgtgtaccatgacttctgcgcctgcgcttgattttgcatggtctgggaaggattcttgatttcaacggcattttgactgcgcacagcaacgggtgttgaatgtgatctctgcaaatctggacgtgtcgcaaagccttcccgcgcactgatcttgatttttggatctgcggggtcatttataccgtgtggcacgccggcctttagctgctgagaagccagtcttcgagatgaacttatcgcaaagccttgagataactgcgatttctcttcttgcctgggcacacggatctcaatttttgaatctgcggggttttcatttatgaagtgaggcacgccggccttaagccgctgagaagccgatcccgataaccgccgagactctctagagaccagggagctgccccgacgacgagatttgccgacatgccctgcacaggggcaaatggggctcctgagagctcgcatgtcgtgactactacgtgttatcacagtgcaatcgtctcctaggacgccagtcgactttggtcgagcactggatatcggcgagctggccgagcagcagccatgagtacacatcgattcagagatcaaatcttccgacaatagtcttttcttagatcgcctgtataaacggttaaggataagcaacaaaggctggggtcgcaacatgcctacctaggtgacacgtcgctacggacaactctatctgagagtcttgtcttagcatccagctggctgtaaaaattgcgtctggttagtcttgcctccttacggcacagcttgtcgcccattttcacttaaggagaattagttgatcgtttgagccttgcgagtgggcaacgtacctgataagaagaagagatatcccaaatctcacatgttgtcttggagaccgggcgaatatatagaagaggcggagatatagaagagggttaaatagtctgtttgggttaaatcgaaatgtagtggcgtagtgggcgcctgggtgtgtgtcggcctgcgtgccgatcatcatacgcctatcattctcgtattttaccatacccaggtacgaactatcggttgcctaacgaattcattgcttctatccctttagtccgatctccatgctactgtatacccgcttctcgccaagcaacctaatccccgaatcccctgaaggagttagcctctcccctgccatgtcactgccttaatcgcgttaggggaagcagacaggtcatagccgccccaagcatcccagatctataacttcctctctttttatgtacgaatcaaatatcattgatctgcaagagcttacgaaatatatcttattcgaaacatttgactgcaatcaacagagttcaggtctacccgtaattgcccaacttgtctcccaatatgtcagatacggcatcttacgatttgggaaaccttcgcgcctgggagtgaacacggggtgcccttacagcgctaggacattgtctgctcggtcaccgctatttggctgaatttgaacacaccggttcttgaccaagcttgagcatagaccagggccttcagcccaagagcctttgtttagccttggtttaccctgggcactgggatgaccccggtcctttcgcattgagcactatagattacgttcctctttctcctagaatgaggcaattcttgcaccgggtcttttaagttattagtgtttagggctcatgtcacgctcttattaccggccttcgtattaatcattaatcatcaggtcgagattccttaaatatccggtgactggcaatcatgcaaccgctcacggaagccgacagaatatcggaccacacagccttgaattgttaaaacgcctaggtgatggctatacttagacggggttgaagctatggacaggggttatactgctacctaatccctatttatctccatcgatacggatacctaaccaggtcaagatacatagttcttagcctagaaacggctttatcactcacatccaacgtacactagctaccgggcctaatacaaatgtggataaaccgggcgtaaacactccgaaggctacaaaatactcaacgtcatccacctgtcattcaaatctctctacaactgtactttgaacctatcaacaccaaaacaagtggcttaggatgacgttagtccatttctgcgtttcaaaaatcttaggcagagctgcctaagcctatcgcgtaagcgcccgtaccgattggagggtgtttaaggtacctgtacctacttcgtatgaaaaacagcatgacctgcatatgtaggatgtaggatgtagtcagtttcaattctattaactcccatgcaagagatacctattccaatataatcaatcaacatgttgtccaatcccgtgccacccaataccaacccgggtcgcattttacagcgaggcaacttccgcgatccactaacccccgaacaaagggatcccgctcgttaattctacctcccttcgaggaaatcaacttcaacggaaccgctgcaagggagtggtgaggtgatattactgcaagccacacgggaggaagaaggcaggaaataccttgattcgtcgcccgtacctgccatcacccgggtgaagggctatttctcggtccggcttccctagtcgagacattctatgtacgtacccagttgacgccgacatttaaaatgttagtgtaaaaagcttgcatgggatatgctcgttgagctctagcgtttgaagtggggaagacgggctgcagatttcacccgggtgaaatagttactacgcgacttctagagtttcgggatctgcatggataaggggtgtgtgcttgtctaaaacctgggtttgatgttgcatgtcgcaccctgtgtatggcgccctgtgcatctgtggggttcgttgatcaggcaaagctcaatgggctcgggtcggttttgtgtaccttcatatcctggaggttctttttcttggagaatggtggatacaacctttggattatgcggcgaatttgtgtaactattgaactaggctttctttaagctctcatagccgggtcatgctatactatcactagtcattgctggtcagtttgcttttcttggacacaggcgattcaaggcaaccccacattttggagattgaagagcaggtctatggctatcggcggattcactctaggcagcgatgtagctatacatactgttgaccgctgctccaggctctgtcgggtgaaataatctctcagccacatgcaggtttctttgatagccaatctagtatattgaccaacgaaataacgaagaaatcacttcttaaaggctaaaaggccgagaatatgattctcaagtggtagacccaatacgaatatatattgcagaagataaaatttgtagacaaaattatgcaataaaagggggaactatataaattccgaactgatagctccaaagttatgaacggagttctatgattaattcataacataatcgaagcagcaatttcacaagagcaaaattaagtacatattcacaaggagctttagctacaatatatgcgatattcgaaatacattcaacgtgtagacacgaaaagaggtgaaatcaagactgaacgacgtcatcgaagcaaccttgaaaacaatgattcacacgtccactacgcgctgtatccaaaacacctaaccaagtctcacacataaaccaactcaattgacagcttaatattatctgacccgaattaatgaactccatccgccttgccgcgcgatacctcaaatcaacgcagcccatccccacacaccgaccaaccaccagcatcacacaagccacagcaaaaaccgccaaaatgtcaacattcacactccccggctcaaatctgaacgtgaatagcatcccagatctaagcgagaaagacctcctctcattcccagccttcaaaacctggataacaaccctccagcactctctcgcgcgacaagaacacccctcacacgagttccacagtgacccatatgtactgcgcaaaatcgacatccaagccgtcgaccgcttcggtggcgggcgattaggcttcgtcaaattgaaagcggatgtatcgaatagccagggcgagactctgccgggtagcgtatttctgcggggtggcagtgtcggcatgttggtgagtaaagttgtgttccatttctactcgataggaggttttttccttgatactctatttcgagatctagaagaaaaaaaaaaagaaaatattacgccctagccccaccattcgaaaatagatggcttgttctaattctatgcatagcttatcctccacccaaatgatataccaaacccgactgaaaaagataagcgcgttatcctgactattcagcctcgcattccagcgggctcgctgtcgttcgcggagatcccggctgggatgctcgatgatagtgggacgtttgctggcggggcggcgaaggagatccacgaagagactggcttgcgggtcgagcagggcgatttgatcgatatgacctcgctggcgctgcaggctgcacaggaacctggctacggtgagcgcctgcaggctgcggtttatccgtctcctggcgggagtgatgagtttattccgttatttttgtgtcagaagtctatgccggtaaaggagattgaggggttgcaggggaagttgacgggattgcgggaatccggggagaagattacgcttaagattattcctttggcggatctgtggaaggaggggattagggatgggaagactttagctgcttgggctttgtatcaggggctgaagcacgaggggttgctttgagggaataaggcttggctttgctggtagatttgtatttcataggggtttgtttgtaccaatgtatgcaagctagtgagatatgaacaattactcgctcacaacttccatttcttcgccagttcaatgccctcagctagtgttcctatcctggcatcaatagcataaccttctttctcaagcttcttcaactcgtcgaacaacgacgtcaaaggaatagtaaagcattcaatgaactcgttatcctcgagctcaggcttcgggttcttgttctcgggaagagacatatcaacccggacgtggaccatatgcaggttggtattgcaaagtcctgggtctgatcatcacaaatgtttgtcagcttcagctttacaagtcaaataacctgccagaacaaaacaaagcccgtagccaccacgtaccgttaaacataaccggactagtctgctcggcaatgccaacataaccagtctcctccttaagttctcgaacagcacattgctcaggtgtctcgcccgcatcgatgagccccgcaggaacctcaatgacaattgcatcaatgggtgggcggtattgcttctgcagaagcagctcctcgccagaatccttgttcaaaatagcgacgatcccaacgccatcaagatcgagcccggcaggacgagtctaggaaaacgcggttagcatcaaatccgaaatctaaatttcaaaatggaggttctaatagattgttggagttgggtgaccaagatcgaccaatgggtccggtacacatcgcaaggcaaccggtcatgtggttttgtttgatacagagccaggcagcgcccgggtttatgtcacctgttgacgtcccgggactggggagccccactaatgctagcccccgtttcgtgatttagatgaggccggatcttagttgggtggcttggctcccgtaacagtcctgcaatcaggtggatccctacgataggtgtgacgcatataccccggacatctaccaacagcgcgcatagtacaataagcacagaacaagggataggtcttaccgtgcgctcagctgattcccatgttcgctcgacacccagcgggtcggtgtatgttgtcttgaccattcgagcccagcgggcttcgctggggtcctgtttggtggaatgtgtcagtcgtgcattggcccttttttggtgatatcctccgcgctctgtctatataatggacttgggatttgctgaagagacccaagggagattaggaaaacgtaccaatggtccccgcgaaatgagtttcgacttggcctgtacgcgagctgacattgtaacgagttggcagtggttcaggttgaaagagagattcaatccgatgtactccatatgtattagactgacgttgctcgatcgaccaatagagcgggggcggggttagcgcggggttagcccttatcttatcagtctatgactgcagtaaggtgtccggtacagaccacttccgcactatcaagatacttgctatttgctttgcttttatttcatgcagctgcatgttattcagcgcactgaataaaccccgtcctgacctcgatcagcattttggtactcatcgcaaaccccgtcctcaagcttcacattttctaatcatcccctataaactggcaaaattcggcctcttagctgctgtggctcgtccgtggtatatattttgacttcagcatggtagttctcaacacagatgagcctcaaagcaaatattttcaataccaactaacgtcacatgtaggcgtagctgtgccctgtcagggtccatgggtacatacataacctgaaagtacacattcttttttgaaatttaaaccgattcctattctcctaccaccaagcaatagcattgatagcgcttatcgcaatggtacccgaagtacaagatatcgccgctcttgagctgtacgaagccgtcggggaaggtcgcatcgaccgcgttgaatctcttctagcagccggcgtcgacccaaatgcacgattcgacaacctaggttccgttttcacaggagtcgccgaagactgggccagcgaagacaaaagtgccaggcctcctttgttcaaccccgaccagactgaacaaccttcccttcgccgagccacgggcgagtccgaaggttcatgcagctatctcgataagcccaaggccacgcgtcttatgaatgccctgctcaagcatggcgcagacccgtatgcgctatatcggcagccgatcctcaaatatcgatatgtgcgtctttaccccgggcaaacaagagacgaagaggtagatgacgaggcgacggaccttgatcagatatgcttcgcccgcaggggaatcatggaaaaagccctccgactggaacggaaacggcgcaatctcgagcaaggagtgtacgatcccaatcgggacgaattcacaagcgatttcgaaggcagtctcgacgatgtcattgagtatctagatcttcctgtcaattacggcgtgcgcagtgttatccatgcactactcgagggcggcatgttcgtccagcctatattcgacttcctaggggacacgctggatgtcgaacgacgagatccccagggtcggacgctatttcttacggcgtgtcggagcagagttggtccagatgctgcgacaagtggtgtctatggcggtctcagcacaataaactacgacactggaatccacgagaacccctacccccaaccagagaatccatggagggagttcgaagccaagaactcgaaggcctgcactgggccaacgttcctctccttttccatcgcacgtggagtcgatctactggccgttgacaattacgggaaaaacgccctccacctgctgtttacctatacagattgcgcttggataggtttaccaccgcctatcgatactacacttgcgcacctgatcgaaacctgccccagtcttataaaccagcctgacaaggctggtacataccctttacatctcgctatctggcaaatgaactccatcatgattccagcgcgaaacagtccggcatcaatctaccatttcgaaaccgcggtagacgcccttctcgctgcaaatgccgatactgcggtccgagacgggcgtggaaataccgtgcttcactatctggctgggagtagactgggagaaaaggatcgaatgggcgatgagcaaaggcggtttctgcggaggtttcttgaggacggtgttgaccccagagcacggaatgcggaaggcatgacggcactggagatcttctgcacggtcagctatgatgaatttggtgatgaggggttttatgaccggtattttgccattgggcaatatgttattggccagtttgaaaaggctggctacgacatccaggagacgaattcgaaagggcagacgctgttgcatttggttgctgggctcaccgcacctgaggggatgtcttgggctgcgtggccttggtttcaactcctccggtctaagggacttgatcctatggcgaaagacggggaagggaagactccgatcgacattgcggaggagaacgagagtatcaatgtttggttgcaggaggaacgtgagtccatggccgcatagccgccagtgatatagagtactcttttacgtgtctgcaaggtcgctagaatataattccagcaccagcgaaccctttataatggtattaaaacttcaaataactttaaatataaaataaacacccgaataaccaataaaaaggtatagttaatggtatctcattgcgcataaaaacctggttataaagacggagatactaaagaataatgcaccaggcaataagaaagtagcaatgaccggacacagtccagtctcaggcaagagttgtcactctgtgtcaaaagatatagaaacaccttttgataacggaaagtggcaacagaaaagagtccacgatactggagtggcgtgaaaccaaagaaagaatagaagaaaaagctccatagcggtctacgctcgctctcataacatcgtgggcataggcatcatcagcgagagtgtctttaaagggtcgactggacatcgacgctgacatcattctcgatttccttcatacacttctcaaactctgaccaatgatacatgacgctcttcgcgccaatgtcagtcagggccttcgccattgccttctgcgtatcttcgccattgtagctgccaacgtacgcaatcacgggaataccggcacgaaccgcagaaagagcaccagacttgctgtcctcgatggcgacagtctcggaagcacgcttgccgacctgctcgagagcatacaggtagatagcggggtcgggcttggaggtcggctttggcagggagctggcggcgctgaagaccttgttctcgtcaaagaacttgtcctgaccgaccttccggatggaagcgagcacgcggcgcaacgcagacgaggagacgacggcaagaccgtacttcttcgcggcgaaaaccttttccagctcctcggtggcaccgatgcagcttttagccttggcgttcaacttggcaatgacttggtcctcttctctgatgacgtattcttcaagcttgtcctcgtcgatctggaagtcatatttctgctgtagagagatcagcatgccgcggaagttctggccgacaaagtctttgatgagttggtcgccggtgtaacggtcggggatgttgttggcctccaggatctcattggccagatcggcacaagcctcgaaggctagctcctctgagaggaccagcgtgttgtcgcaatcgaagaagatttccgtgatctgcagtgcccgttagtgtgggtctctaatgggatagatcgtgatcgtaccttagtcatgatgaaagtgcggataatagatccgagtgtttgtttatttgtttattgagaggggatgtgagtagaagggcaattgggaagtgtggtatgacctagaagagtgggagttggagagttcgagatggagagaagaggaatgccagaaggtacgagaatcggcgattggggtatttaagtcgaggcaggacccccaagacatgacgccgcaatcacaatatcccaggggaaaccgggccagggcgggaggggctggccattgacgtggggcaggaggtactggatactttacattaggcgtgttttgttagtaaatgcaagtactagtacctcaaacctggggagacggccagatgttcagccaataaaaagcacggacccacgcaggactagtcttcttccggtatagcgtctttttctactccgggcaggtgcgatggtttcatcgcgttttcgcgctttttctcaccggcgcctttccttcgccttcgacgttgggatgtttgaaacctgccttgatagtcccgtgatattatttcattctttatgactactagagtcaagtgactttgaatatgcaagtaaccctcacctgatctctaaactacaacactgcaacatgactggatacaactacggagtatacatcagcctaccaggtccaaactcatgcacggtcatgcctccgtcttctcaccgtctacccactgttctccgaggagaggccaaaccccaattcgcaaggaaagccgggacacggaatgattgagaagtatacacaagcatgtaggcccgacgctacatccgttggtccatatttccgtgtcctctccagtcactggcgcggtcagataatatcaattacggagtatgcacttggacgttcggagcatgcttggcggggactagagaaccccgatgttagccttacctcggtacggagtacggagtgcatatagtgctattccagttccggtgagccatgagcgatctgacatatacctcattctattatcgccatggtagtgcttgagttgtgcccaaccttggaggcatccatggatgtactccggagcgcgacagtccggaagctagtatagactttctgcatagtagaatttacgcagcaattatttcaaccaatagacatggccacatttacaccaggaaccaggtagcaccactgtggtatatacatcgcacgaacccgggtccacctcttttatacaatcatcatgattggccagactcaaattccaaccctgctaattccacaacggcttcccttcacattcgacccgaccaaaaataaaacatcgcagcataacgcctgatcaatcaaaagcaatctaaccagcacgacccagcagatctcgggcgaaatcgccattggcacagcccgcacccgaaacgtctctagtacaaccccggagactggtcactgagtacgacctagccatatttgcattcaaatatacttggcaataaagtccagccaaaagaaagccaagcatggggtcgtcctcggatactttcccgaccctggagtcccttcatttcccgtcggcgcagctgtcaatctcccagacgctttcgtcgctgcgtcgatcggcgctgtccgtcgccaaccggctcgagtccatcgagaccgatgccgcctttgcgcaggacgtcgcggaccaatatggcttaccgctcgttgcgaatgagcgctgcggaagctggtatatcccgccgacggccaaggctggcagtgcttattttaaaagcaccgatggccataccggtcagtgggattttagctttcgtaggctgaacttgcagttgcttccgttggctagggatcatggggggtaagtctaacttattttgcactgtcgtcttttgcttgtggatttacatatgtgttggagtgccttttgacccaagtataaactatgggaacaactccatcactacacgatcatcctaagacatgaaaagaacgagaaaaaactgactgtatttcctttccgctgcagctgtgtaattgtggactcaactcgccgagggaaatgtgtgtaccacctctacctttcccttcccttacccatctagtcaccatgcatatcatgactacaaccaaggctcggtccccattaacccacccctagtaatgccagacgcactatcaaaaaccgtcccaatctggagcgccgtgctaaacagagccctattcccatccgcaaccgcataccacccagtccgccttccaccagattacctaggcgcatcagaagaagcacagatcgagaaccgaatcgacggattcgtgcattccctcaaggtacgcatgtgccattaacaatgactcccgcatacaacatacccttacaccgcacgcccctttctcatccatagctgatatttaactccagaacctgaaactcgatctagataatctacgccagcaactcggaaaaccaatccagatcgcctgggccaacaggacgtatttccacccgccggacctgcacacgagcgatgagtacaatctactcgtactgtgctccgcttcgaggcgcgtgcttggcgctgagatgtccgagggcggatacatccaaggcgcgggcgatgatagcgaggcgtgggcgtatgggctgacgccgccggtgttctgggccaaccaggctattttgaagagtacacctgaagacgaattgccagagcttattgaccggctggtggcggagcataagctgctggatgtggtgcaggatgcgacgctagtttcgcctacgcgcaatttgtatattggatctggggccggggtggatgttgggggtcggtatgatattgttattgattgtaatgggagtgctgcggctgtggagggtaatgcgaaacggttgaatttgggctgtgattctgggaaattggggagtcgggatctacggaaatgtctggataaggtgcgtgagtttattggcgctcgtcttggggaggatccgtcgctgtcggtgctggttacctgtgagagtgggaaggacctttcggctgggacgcttctggcgatcatttgtctcttttataacgatgagggtatgtatgcaatgccccagatggtctgggtgatgaattcaaacgctatgtggaagaaaaataactaatgttttcacaggcggcttcgatgcctcactgagcaagcgcgcgatcagcaagcagttcattcgacagcgtctagcctggctcgtgtcgtcgaagcatgacgtgaacccctctcgcgccacgcttcaatctgtcaatgctttcctgatgcagccgccggattattgacctcgagcaatgtgattacattgcgtcgcttggtcggatgattggtttcgaagcgggtcattaagaccatgccccagcgatcgctcattcgttgtccacggcctccacgatggcgccggcactgccctggtcgaaggaatccagcacacccatatcctccacgctgatgtcgaagtcgaacacatccgcattggacacgattcgttcggggttgtcggtcttgggcagaggcacccatcccttctgcatcgcatagcggatcaagacctgctgagtggacttgccgtatttctttgccacttcgactagcgtggggtcgttggctttatagtttcgcaccaggggcgaatatgcctcgaggataatgccgttcttctggcagtattcgccgatgacgcgctgctggcaccacgggtgaagctgcaagaatagaatagtcagtgacccgatcaaaccgagaactatctacgtagatagaaaagtaatagaagcagagcacgaacctcgagctgatcaacgtgaggcgggaacacttgggcatatgagcgcatctcctcgatgtgccccacaccgaagttgctaacaccgatactcttcgtcttgcccgccgcgtacagcttctcaagcgcctgccacaagacctttcgcccagcagagcccgagctggaggagtgaattaagaacaaatcgacatatccgtcggcgccgccgatcttgtgcacagaagccagcaatttatcgtaagtagcctcgaccgaggctgcggggctgaggatcttggtcgtgacgaagatctggtctctggggacgctagtggtgcgaagtgcctcgccgacttcggcctcgttggcgtaaaactgtgctgtgtcgatgtgtcggtagcctgcttccaatgccttcaggcaggactgcacacactggtttggcggggagcggtagacgccgaaaccgaggcgcgggatgccgacgctcgacttcgggagggggagaagatcagtgatcttgaaggaggcggacatcttggagatagtcagggatattgttgtttgcgaaagaaaattagttgagagtgagtatttcaagagaatcatctcctggccccgctttgcgaaaatgaggtcattccggatgactaaacgagtaaactcaaaatacgacaataactatgatagggtatgcgcaatattaagtccaattgaattccaatctacttggctatcctgagaatctctaatatatctgttcactcatattcactgtcaatagcctagtaatgtaaacacttgtgcctgcattgtacctggccaaagaattgcgtgatactatttgaccttacgcttgtttttatacagctattgcgccatcgaggaacattgcggggctgccgaacaatttagagtgttttgataagaatcagtactctcggtgtctttgtcagttctagtagatccgtctacttggttggcttctctaaccgccagtgcgttgtagttatgggattttgcctacaggatggttgtaatatatatcacaccaattcaaaggctattattgtacataggaatatcctcttgtgattttgccaccttcctttccgttttaagaactactatagataggaaggcataacctaaccgaggaaacaaaatataaacacctcctccctcttcctatgtacacataagataacaattctccgctcatgaacaatacccctagatctggtttcaagctcatatagcaaatatcagtgttcatacaggaaattatgactacgttccgctagatgcctgaatattcgagcccaacccccactgcgggctaggcggtattgagccggtgacaagccaatttaacaagcttatggcagacgggaaaaatccttatgttgtcttgttaatgccccatattcggtgctattcggtgaattctgtcatatatcatgccctctgcttccatggtttcatcttacactaagtcacatatattccccccaaagtaccgacacaaatgactccttgcagctgagacccggtaaatgaacctctgcaaagactccgtgttggtagtatgagaatgcggtactggcaagattagcagcgttctgtgagctgatatgagccactttaccatggtaatattctgggcacaatgatcttctattatcatggcttttgggtttgtacagacaaagaactagagcaatccatgagtggaacacatgtgttatgacagatagacccactcgctctctttaaggtatggcccaaaattgccgaaataaccaatgagtaaacgctggaaataccaatctgaattcggagatccttctatataacgaaccgcatcccgaaaatcaccgagcctcatgcgacgacggccacgggcatagtccatatcagggcttgatagcttgaatgtggagaaaataaaaaggaagtcaagttcgagagtggtgggagagctcataatatgtcctagaactaggaagctatatgactacacatggtggcgagcgaggattataccagtagccctcctctcgctgatatcagaagaaacaaacatcatgcctcacaccaaagaaaccggaaataagagatgccattcctattcttctcatcacgttacccatttcattaagtgagccctcgtcgttgtttgtcttatttgtgaatatgtagtggcacaaaccgaccgcccttaggatagctataagaaggcagccctgcccccagaccttcctcttcttttcttcttcttcagctctctttgcctctggcttagatttggtgtagtatctgttctggtcagtttaatcgctgatagtcctgcattgcaggtcatttctgattattctaatatttggacttcgcgacttggtctctgtgcttgcgcatgcctcgttgcactgtgtcattgggcttacactacccccgatcgacgcgaactccttttcatcaactgttcggcttgtctgggcgcttggagaagatttttgcttgggctctatgttcttatcagtggttgctttgtttacattgttgattaacataggtcaataatacttatggagttcctattacatatgtctattagctctgtctttgtcgtaacttactctcatctcagaactggggttgggggaaaagtaaccgtttttatatgagtgccttccttagtagaaaaccatccttgggccttccactttaagagtatattaagcttcatatgagcttcatgtgagcttgaagtgagcctggagttgtttccacgccgagatctttctgttaagttacagtaagacagtttcatttgcggggaagttgtggggaaagctgtgggcgaagttctgggggaagctttaaggatagacacgggatctctctccatagacttggctaagcctcaatgagtccatggtctttatatcctgcgccccacgctggagggtcacgcgtagtacctacgagggcctgtgatattaatctcgtatcgtaaccaactattttcttctcggtctctgcaaccttgaccccgcactctcgctcaggacatatccgaaagtgtatccggcttcggcgattctacggcatgccctggctatagggcatagagtaagatgatattgccgacagtagagctatataaaagccgcagctaatagaactcttccctattaggttggcgaaggcatttgttcactaactaatcgacaatatggcacagcgattctggagttttcgtggctctaaattggttctggcaatttggattgaagcatgcttcggggtcatgacctttggctacaacatgggagctgctggcgccgtcctcagcaacgcttccttcaacgatcaattccctcggatcaatacggtgactactactggcaccgaaagacaaaagaattctacaattcaaggcaagtcaccgttgatatgaagtaatggatattccctaacaatcacgcatttcaataggcactgtcgttgctatgtacgcgctctttggaatgttcggctcagtagcctgtatcttccttggtgacctcttgggccgccgtaaaaccattttcattgccggcatagtcaacgggattggcaccatcattcaatccactgccttttctctaggccaattgatcgtgggccgcatcatacttggattaggaactggcggaatcatagctacggtttcactttggcaatcagaagtttcgaaagccgagaatcgcggtagccatgtctccgcgtttggtgtcttcactggatctggcctttcgctttcgctgtggacgggcttagggatgtcgttcacgcagcccaattcagtgtcgtggcgcttcgtcctagtgctaagccttttattctcgagcttgctcagtctcttcatctttgcattaccagaaagtcctcgctggctatgcaaaaagggcaagtgggaagaggctcgggaaatcttgaatcttttgcataatgaggatcccgacttcgaggaaactaccaaacagcccgggggaacaaccagnnnnnnnnnnnnnnnnnnnnnnnnnnnnnnnnnnnnnnnnnnnnnnnnnnnnnnnnnnnnnnnnnnnnnnnnnnnnnnnnnnnnnnnnnnnnnnnnnnnnnnnnnnnnnnnnnnnnnnnnnnnnnnnnnnnnnnnnnnnnnnnnnnnnnnnnnnnnnnngaggatatccggatatcgctcgagcgggctggaaatgccagtatctttacaatgttcaaaatggggccacaacggagccttcatcgggtcatcctcgctgccattcctcaaatgtttctacaaatgagcggcatcaacgttattgcccaatatactcctgtcgtcttcgagcagtttttaggctttgacgcatttgattctggggtcctggctgcagcttcccagttcgcagttatcctcggtgccatctgctgctcctggacagtcgatcgagtcggccggcggaaactcatgctgatcagtgcgactatgatgtccatatgcttcgcctgtctatctggtctattggctcatccagaaaaccgtaccgggatcaaggcagctgccttttttatatatttctatttattcgtctatgtccttgggttcctcgggattccattcctctacgcaagtgaggtcgcggtgactcagttccgagcaccaacaactgggctgtctactgctgtatcctggctattcaacttcattgtcgccgaagtgacaccagtgggattcgccaatattggctggaaatatttcctggtgtactgttgtatcaatgcgctatgcgtgccgacgatctatttcttcttccccgaaacagctggacgttcactagaggaaattgatgagattttcctagcgtcaaattcaatatttgacaccgttaatgtggcaaaaggattaccgaagcacgaacatcgtgagttatatgcggaggaagaaggcaaagaatcttccagtcaagttgctcatattgacgatatgggaagaagagatgaagttgcataactgaatatgcggctttcttgtgttctgactcacaatgattcaattatagtacttgaaatacatgctcttttataggcaaagcgtaggaagcatcccatttcagttagtactcgacaaatgcaaggagctcgtaaccgatgtgacctagacattctgaacaaaaatagagaactaatgtctggcaacatgaaatagaggattgcccctctttagcccgatattcgaaaccgacctacgcgacaattgctttcattttgtgtgaagggaatgcgaatagctgggtaaggggtgttatcagtcgcaatctatgcacgaacatgtacatatcaaagcgcctactgggcatatcagtgcccggcggcggtaaaatagacatctgaaacgtgatatgaagagtaggccaattaaaacttcacatatccagaagtaccaatccattctaataatattcatgtacaaatctcccgattcaagacacaggggttgtaaacaatgaggatctatacttagaagtggatccacaaggaatgcatctgcaaattgtcacttgacaattttctcaacttcaagtttcaacaatttttttttcttcctttcaagcgctagttcgataaacacatttcttttctttcgcgttcaaatcaacaagaaacacggttgctcgggtgattttcagctccgacttgtgggacaaacacaacgacacccccacccctcgacattatttcaacaccccccctttgtgctccagtccaaatcggaaaccgagtctttcagcctctctgatcatcccagtcttttcttctcagccctagaccctgttcgctgtcacctcccgacatcattgccaatcggccctggatgtctcccgtgatcgaagatgttgacggttgagaagcagtggattaatgtgcagcaaaagaccttcactaaatggtacattctccactccgttgctctctggatgaacttcaactgacgagcaataggttgaatgacaagctaaagacccggcgcctgtccatcgaggacttggtcactgatctttccgatggcgtatgtcccgcctctcccccgctcactaatgtcgagttgctgatcgcatattaggtcattcttattcacctcctcgaaatccttggaggtgagtccctcggtcgatatgcctcgaaacccaaactgcgcgtgcaacgcttcgaaaatgtgaacaaaagtctcgatttcatcaaggggaggaggattcagatgacgaatattggagcagaggatatcgtcgatggcaatcaaaagattatcttgggtttgatctggactctgattttgcgctttaccatcagtgatatcaacgaggagggcatgaccgctaaggagggattgctactctggtgtcaacgaaagacggcatgctacgacgatatagaggtccgagacttctcaaccagttggaacaacggcctagccttctgcgcgctcctcgatatccaccgaccagacttgattgactacgactcattagacaagagtgatcaccgtggaaatatgaagctggcctttgagatcgcaaccaacgaaatcggtattccggacctgcttgatgtggacgatgtatgcgacgtacccagacctgacgatcgctccctcatgacatatatcgcctactggttccacgctttttcgcaattggagagagtcgagaatgctgggcgacgagtggagaagtttgtcaataacatgcatggcgcatgggacatgcagaactcatatgagcgccgagtgaaggaattattgcgactgatccgtgcccagcgcgatcactggaagaccgcctcattcgcgggaacatacaaagatgccaaagaacaatcatatcagttctcgctctacaaacggaacgagaaacgccaatgggtagctgagaaatccgacctagctgctctactgggaaatatcaaaaccaagttgggtacatatcgactgcggccgtatgacccaccacaagaactgagtccagaaaattgcgacaaagagtgggagatcctaacccgggaggagcatgaacgcagtcaacttataaacgaaacaatccgtgacattaagaacaagctacgccgctcctttgccgacaaggcaaatgactttgcattgaccctgaagaccttatcattggccatctccggactagatggtgatgtcgaggaccagcttgatcatgttaaaaagctaaatggcaacttgccgcccctggacgcctttctcgatgctattgcagaattggaccaacagtgcgcggaggccaatattgaagaaaacgacttcaccacatacaccctggacgagcttgcgtatgaattgagtcttgtcaaatccagcatttcaaagaagctgtctttccttgacaaccagatagttgctcgcaatatgacgaatctgacacctatccaattggaagagtttgaatcggtattccgccatttcgatcgcgactcttccaatacactccatgagctggagttctccgcagcactggccagtctgggactggtctatgacgaggacgagatgcaccaggtcttcgtggaggtctgtggagcccatcgactgtcacagaatgccggagtcagcttcgagcagtttattcgctttatggtcagcgtgacagaggatcagaataccgccgaacaggtcttccagagtttcagggaagttgccgatggcaaggtaagtgaagcgtttcttttaatctgacaaatcattgggcgacagtcacttacttctattacagccctatgtcacagagctggacctccgacactctctcattccagatgaagttattgagcatttggttaagacgatgcccgcacacgatggccccgatctactcgaggaccgggagttggccaagtacgactacattagcttcatggagaaaatgcgagaagtgaacaggaataatgagagtgagagtgagcaataaaggtatcattgaggttgatatttgcgcagcattactggtggttatgggggatttgcactgacttgttgctgctgtgtttctggtgttttcagcgacgattctcatgttttgaacttctttctggttcgtcttgcattctggggttcggtggttgttcctctttagcatgtatgtatgtattgtgttgatgtatgccttgctgtttgtaatgatcaggataccatgtgaacattttcaattatcagaccatcggtagacgtgggcaagcgaggatggccaagagactctaatatgacattgaatcaccaattcttcaccccaatcgaatctttgaagctattctagtccgatctatagatgtatgaggtggatcattaccgtattagtaaaggatatatcatgtgacagcccccagatcatcgcagctgatgatgagtctgcgactaattgtaacccttgacacgtcccactcctttcgatctttttcactcaaacgctggtcataggtgaatttcttgatcgagcgctctctcacgcatattatctcctccctcaatcccatccctcaaccataaattccaagatggaccgcagcttggacgaaatcatcgctgaagacacggtaaggctccagcgactaatgaaaccaccaaaacgtgcaacttactcattcaattgcagcggaaccctggtcgtacttcaggcggtggtggtggttctcgtcgtcacaataactccggccgtcgtcacgagcgcgatggcgtcagaaaggtacagcttgactagaaaccgaggctttcttctggagtcccatttgcatagcatcgaagctaacatcacactcggtgtccaggtccgccctccttttcctcctctgcgaattctctccttgctccgtgacaatcgtagccagtcccctggatcgttggagactcgccaacgaccacgccacggcaaagacatggaaaagaactttgcacgatatctcatctgacttggagctaacgctaagttccttcgataataacagccatacacttcagaccgtgtcgatcttaacctgtgattatacctcctatctactacggtgtgggtgatactgacgggtttctggttatagagactgggtgcacgacaaatttgacgacgaccgatgtatgtggctttcccgtactttgctgggacctatctaacagcattcctctccagcccgcccgtcccgtggaggccgcagaggccgcgatggacatgattccgatcggtaggcgcctccttcagccttaaattttaagcttgtctgacagcgctaattgaattcttagccctagctcactgaccaaggttcgcgtggataatctccactacgacattactgaaagcgatcttgaagtacgtttcaatcatactcaaaccatcacagaataacaccctaacaaaccccctcgctgaacaggatctcttcggccgaattggacccgtctctgaacttactgtctcttacgaccgcgctggacgctccgagggagttgctttcgtcacatatgcccgcctgaaggatgcacacctctccattcaggagtacgacggagccaacgctaagggccagcccattcgtctttctctcgtccccggccgccgtgaacgtaaccccctcgagtccgcacagcgccctaggtccagccttttggaccgcgtagagcgcccccgcgacgaccgtagcatgagccccgaggacagcgaccgacgccgccgtggcggtcgtgctcatcgcagcgacgtcactaagcccgccccagacaacatcgaccgttacgttcccgggcaacgctccagccagcgctctcccaaccgccgcggcggaggcagacgtggtggtggccgcgacaaccgttcccaacagactgaaggatccaaccgccgatccaatgcccgtccgcgcaagactcaggaggagttggaccaggagatggaagattactggggtagtgccaacaacggcggtggtgaagctgctgcacccgctcaggacgcccctcagcagactgctccggcccctagcgcacccgctgccgacgatgatatcgatatgattgagtaatacctcacggtcactcgaactacaataaactcgcttgtctttcgcatttaagattttgggacctctatccttgcttttggacttttctatgaattcggaccaccttggcctttttccaactcttctcttctctctttccatcgctgaggcttttcagcatgagggctgaaactctgtactttacctcaaccaccaaattgtaactcggtctatttcacacattcggctttctactgctttggtttactcttgatgaaccattatccttgcccttcctctcgttgcatccacactggcgaactgggagctcattatatagttttttggggtttttttttgcattgttcggtgtcttcgttcttgtctttatatagtctagtcgtgggtaaaacccgactcgtgtacgtcaaaagtctgcatataaagagcaggaggctgttcgcaatcaatggatgatgccaagatacaattcgatagagcataaatccaatcaaggccgccgccaattataaagagaacaaagaccgcaaacgataaaaacagaagatatggtattcttccgtaaagtcttctacattgtaacaattatgagaagcaagttcacttccacagcccatagggttcgcggcatgctttccataacttgatagtaccgtcttcactgccagtgccgtagagcttgccatcaggggagaagctgacagaccagataggaccatggtgacccttttgaacctctgcaaaaaaagttagctcggatttaacaagcataggaagcaaaacatacccagctcctcatccgtgttcaaatcataaactcttgcccaggtatcattcgcactgcccgtcaccagacgaccagactcgctattaacggcagcactagcaacatcatagtcataatccgcctttttcagcaaccgaccaggctgcacgccatcaaagagatagacactcttcccagcagcgacagtcaaaatccccgcatcattaggtctcgtcgccagactattcagctcgcaagagccaatcgtgccatcaaccgcatactcaacgatcgggtcacgcgagcgcagatcccaccagcggatcttgcggtcttccgccgcagtagtgatgacattgtagtcctggttccagacgatagacttgatcgtcccgccgtgcacgccggcgccgatctcgtagctcgccacgccattctcggtggccggagaggccgaggatgggggaggcggtgttgagcccgtgctggaactgccgccccgcgttagatcgaagattcgtagcttcttctctgcgccgcctgtcgcgagcacttgcgggttcgcttggattgggaatgctactgcacgcacgatgtgtgcgtgttgcagtgtgtgtaggcattcgcctgtgtaggtgtcccagaccttactgttttgggggttggggttagtttattggtgtgggaggtgggttggggggattttgcttacgctgagaaatcggcggctgctgttgctgagatggcggcgtcggcggagagccttgcttgccatacggcacctttgtggccgaggaatgttccaatcctgggtttgatgttagtgggtgcttcacgggtttggtttcatttgccgtaccagtctcccgttatgccatcgcggagcatggggttattatctttagtcggttagtgactatccggtaactggtgagaatcattgctttttcttacctttgcatgaagagataaagtaatattgctcgtcttcgacggtggaagagaagctcagatgcgtcaccggacgagaatgcccgtggcaagtcagagggactaccttggggatatctgttgaagacctatcagtaaacatatcaagacggtgattttctattccattctacacaaatcactcaccggcagtcattttgtcggtgttgaaggaagttccgaggtttcagtgattttgatgttaggtattagaaagacaatcagatcagcaaagtgctatgtgcccaaccgagagcccacgagttgatatcaagatgaaaatctaggaagcagaccgagagagagttcaatatgtctaaggaaggtacataagaaattcgtcagtgtcgtcaagtcatcaaacagatatgtggggttcgaggaagagccgatgacaaaggatcgaaagtggattggacaagaatttttccaaccagacacctgaaaaggagagaaggcctctgggaatacgaaactcctttggggtgtagatgggatatcgaatttcaatttcaaacaataacgggcagccctggagatcacctattaggtaaggcatgcgctaatctaattcgggtagaatctaggcacgtgatatgctattgtatatggtcgcgacagttgacggcaagttattctaattagacattgacagacatctaaaaggagacaggaaaaaatgtagcaaagcatctaaaagatacttgaaaagatacttgaaaagattactctacataacaatgacagtgaatgagaggccagaaaaggccgcctttctctccactttaacttttaagcaaggactgttcaatggagaaacagtgcagttggttcaaatacctagatagatagaaagagaagaagcaagcaagcatgtgtcaacgatatgtaaagtcatatgacagccaatcatgcagatcgtggcaaggaaaagaaaagaacaaggtaagcacaattggcccagcagaaatccataggaagttaatgatccatgaagtcacatggtagacagtcatgctgattgcgacaagtatgtctgcaaaggcaggagtcggaagaattactcaacagagcgatctaggtcttcatcgctcaaatacccacgccgaagccttgtgggcgacatggattggctcgctctggggggcttgttttcgccggccattctgacaggcgaaagtgagagagtcggcggcttgttttcgcccaattttctgacgggagggggagagcgagtcggcgcgctaggaagcctggattcgcacaactttcttgccggtgcgggagaaagagttggcacactgggaggcttactttgaggcgagtctgtttcgggcgagggagatggacgggataaccggatgggtattctccgttggaaactcggtgctacttcgaccggagctcacgatcccgaagggacacaaactgaatcatcatcggagtcaatctcactctcgtcatcctcggcggctccgcgcatcgctgcaatccgatgtagaatccactgcaactccaacaactccatcgacggtagcggtttactcttaggatcatcggtctccaaggtgaaaatatgccccgaccgtatgagagatctcatctcaccgtgaataaggcaaatattttcgcctgggctttccgtaaagctgttgatatcatgggggaacgggtgccgcatcgtctcgatactgtcagaagctttcttcgtgattttcccaggagcagggagccagtggaaggcaacttccatcgatgtcttcttcgtgttaattgagataggacgaagagcataaagagtattatcccagtaggtatggactagggccataaaggtgatgaggttctgcactcgctcagtatccactttgccatcattatcatcgatagtcattatttccgctttccacttcatcactctgtccacgccccagaatccttctaagatggaccattctatttctcgagagctattgttcagcttgaatgggaggatatgggatacatgcagcccatgtataccaaacttggtaagaacacatgcattcccatcgcgagtcaaggcctaaagattcgaagttagcattatatctgatatatccttttttccgcttaacatacggcatccctaactgctttaccacgtggcaaaactccacgtgtagcttgttccgacgaacccattggttcctcactagacatactcgcaggcgggccctttaggcgcttcccaggagacgaggattcgtctacgggcacatcgtcggcctcgcgcttttgcccctttgctggtttctctggtttctctggtttaggctgtttcctgcccgcccctattactaatcgaatggccagtttagtattgtagaagtcgtcttcgatgtatttatactgcccaggcacgtcaatgtaatggggcaaaaattgagtctttatagctgtcttcatatccttatcaggattttctgtcgcaaactatctgagtctatcgatatcgctaaaccataacatgaagaacatatggcgagtcattcggcgcaggaaagggtagagacgtatcatcgtctcgactaggcttcggcgttcaggatcttgaaattcatcaaaaatagtgactgtatcatattttggctcagttggttgatccatgatggacaaaaaaaaagattctaagatgatggcaacgatatacttgatactgttgcgtggttggcggaaaggaagaaaatagtgggactgttacatctccgccaccagatcggtaaggcggtactggaagtccaacaacaacaacgggaagcaagcaggcaggcaggcaagtaaggcgtcagctagataattaagatggggagaaggaaagaagaagcaagtgcaaagtggaaggcagccagttgatatagctgatcaatttgcaaacgttgcaaaaaatctaatagtaagcgagcaagcaaacgagcaagcaagcaaacgagcaagcaagcaaacatgaagcatatgatgaaggtttagtagatcttgacacaagcaggcaagcaaacaccaaacaatcgtgctctccaacaccaaataagcatgtactagtaatcccgacagcctaaggcctccgggatagtcgttacagagcgaagcgactggttctaacctctaaggttacgtaaggtctccctcttgagggctgacctctcgatatcggcgcctaaggcgtattagagcgtgaagggatatagaatatatcgtctagccggattagaggtagccagaaacggccagctttcacgccttccaagcaagtagtattaataccgtctgcatctttgcatctgctactatctgctgtttgtttcattgaattgtttgctagatagctagatagctaagcaagatgctcgagctttacaattgcgtcttctttctttcatcatttttcttatttagtttagggtgttgatatgaccaccccccccccccccccccccccccccccccccccccccccccccccnnnnnnnnnnnnnnnnnnnnnnnnnnnnnnnnttttttttttaagtttggggttttgtataaccccccccccccccccccacccttggctctgactattgaatgataatgttgagatatatcaggctgtcagattggatagttaaaaacagtcccaaaaaatgctatggataacagtagccgcaactgtagtcagtggtattcagtaagtatttgacacctattccattttccacggcctaggaactttaagtcttacttcaaatgttacttctctttcaggttcaggaaggggatacgtgtgcccaagtatctctggctcagtctatgtctcttacagatttgtatttcctcgatcttgacgatgcatattgcgtcaaggccgttggttcaatcactagctacccaacttacacggtgactggttatctgttggcatatgattgaagtgacaggagtattttgtatgagacaataaagttgaattctcctaatgagcgaagaataaaaattgtgagtcttgtaaccgagttgactaatgtagacaccaaatgccaagactcggaatgtagccgaaccgtggaacctgcaattgctccgctccttaaatccacttcgcttcccgaccccgactaactcagacaggtacaagtgttttagcctggaaacctgccgattcgtgaaactagagcgtttgagagaacaattttatctctaccttcaaaccctgcatctgtggaacctgtttacccgtggaccgtggtccgtacccaactccctaacataccgagctttctgtttttcttccctgtcacttcataacaagagcctgggacccttcatcccaaaagttaacagatccatgattaccagaagagctcttgaacttcatgttttcctcgcatctacagccaatacgccctttattcccgcccgggtatccctgggttctctactctcatcaataacacttcacgtacttcacgtctcgctaagtcatcgccactgtatctcagtaacacaactaccttttcaagaacagtgtttactccttcgaaacgtgatcccaaaatgaaatccgattcgaatgaggccgataggcttgaggcgattcttaaaaaagataacttcacgatatagggctttgtgatttaccactgcacgtaccaagatgatgccgagtgggagaaatttatgaaccgcttcccaagcgcagttctagagtacctagagttctatagtggtcttaatctcctcaatacatttgccccgacggtcttccaagacccctcgttcaaggctgcgacggtagtcactctccgcgagcactttaacaagtgggcaaagactataaggaaagaggaacagggtgttagtgaagactatacccgtacagggcgctatcgatgactggcagtcgtattatatgcgatcgcctggggttgcagctatttcttgatctctagtctcgaagtcttgctggagatggggattgttctgcatctttaagtccccgtagctccttgtatatttccgatataactcatacatctgaatgaaaactacaattcatgaaaagggccaccggccccgaggtacatattttaactctttttttaagatcgacctaacatctcacaagtatgacgtgttagtcaatctcattcgcatcatcctcggctccgtgcatccctgcaatgcgatgtagaatccactgtaactctaataactccatcgatggtagtggatgctccgctgcaccaacaaatttggtgcagtgaaggggagcgacgtatcatcaactcgaccatgcttcggcgttccggatcgttaaattcatcaaaaatagtgactgtgtcatactttggctcatttggctcagttgggttggccatgatggacaaaacaacagcttctaagatgatggcaatgatatagatacagttgcgtggttggcggaaagaaaaaaatagtggcggagatgcgacacctgatcagaaaggcggtcctgaaatgcatgcaggggggtaaggatgagaggcccaagtgcgtcagctttccttgtcactactttcacaatggtttagatttaggtatccgagagatgcatatgcaggtaagatacatcagggaaaatgctcaatccctttagagcaggaccaaaaaaacaatctaatgtgttgatttctatggggcgagacgggatatcttcgagtcttgacttctcaccgtcctttcactgtagttaatcaagttgaaatgtttgtttgttgttccataacgaggaaaggaatcaaattggggtttgtgaatcttctatgttgatgtgatccttagattggctaactggaggagagatggctgtccactatgttgtagatgattccaagcttgcccgaggattcactagttagtatgatagacgaatgagtcacttgaggaccacctgagcatgtccttgcctagggctagtacttgataagtaagacctcgtgttctagcaggttccccgaatggcgttaccgcccacgtgatatgaccattgatgcttcggcggggcgatcccccggaacgactaaaggacaacaacatccaggggagcttgattgatcgttaagtctgcggtgatacccttgaattatttcttctttggattcctctttcttcacgatttcttccctcaaagttttatgtatgcctgacttcaagctctccgcaactttggagggccacggcgatgatgtaaggctcctggtccaggcgtctgtaccgacgccattgaccgcaccaaaccagacagactactcacattattttggcctaatctaggttcgcgctgtggtcttcccaaatccaaatgtcgtcctttcggcctctcgtgatgcaacagttcggctctggaagctcgtctccacttcacctcccgcatacgactataccatcgctgcacatggcggcgctttcatcaacagcttagcctacattccccccacacccgagttcccagagggccttgtactttcggctggacaagatgcaataattgaagccaggcagcctagtaagagtgcagaagataatgcagatgctatgctcctaggtcacggccacaatgtctgttctctagatgtgtctccggatggcaaatgggttgttagcggcagctgggattccacggcccgtctatggaaggtcggcaaatgggagtgtgatgtcgtactggaggggcatgaggcaagcgtctgggccgtgctggcctatgacgagaacacaataatcacgggtatgctagcttcatgtcgccctaacaaatccgacaatgctaacatcaccgcaggctgcgctgacaaaatgattcggatgtttaatacctcgggaaccctactcggaagcgtacagaactccaacgatgtcgtccgagccttgtgcaagcttcctgcctcgaaccctacaggggctcactttgcctcggccagcaatgatggaatcattcgtctttacacactgcagggtcaacttgtcgcctccctgcatggtcatgaaagctttatctactcccttgctgcgctcccgtctggcgagctggtgagctctagtgaagatcgcaccgtgaagatttggaacgggacccaatgtgtgcagacaataacacatcccgcaatctcggtgtggagtgtcgcagcttgcagtgagaccggtgatatcgtcactggtgctagtgaccgcattgctcgtgttttcagcagaagccctgaccgtcatgcagccccggaggccatacatcagtttgaccaggccgtcaaggagtcggctatcccagagcagcaagtgggtaagattaataaagaggagctacctggtccggaatttttgaaagaaaagtccggaaccaaggaaggccaggtccagatgatccgagagcctggtggtaccgtgagcgcccacacctggtcatcagcaacacaggaatggattgccatcggtatggtagtggactcggctggaagcagtggtcgaaagaccgaatatcatggtcaggattacgactacgtcttcgatgttgacatagaggatggaaagcctccgctgaaactaccatacaatgcctcgcagaatccatatgaggctgccaccaagtttattggagacaatgaactccctatgacctatctggaccaggttgccaactttatcactcagaatacccaaggtgccactattgggcagtctcaggaacccgcaggctctgatccttggggctcagaccgacgttaccgtcctggagacgccgcagcggctgaagagtctcggccacctgcccccgagtcgcgccctaaggtgctccctcagaagatttatctctccatccgctcggcaaatcttaaagttatcacgaagaagcttcaggaattgaacgcgcaactcgtgtctgatggatcaaaggacgtggctttgagcccctcggaggtggaaacggttgtctccttgtgcggccagctcgaatcttccaaacaactccaactttcacccgaggttgaatctggagtgccattgatcctgaagatcgttacaacctggcctgccgccaatcgactccccggcctagatattcttcgtctactcgcggcggctgcgccatttacagcatccgccgagtacaaagacgaaaatgtcgtgtcgggtgtgatatccagcggtgtttttgaacctcctcttaatgtcaacaatgcaatgctcgcaatgcgaacatttgctaacctattcgagacgactgccggccgtgatctcgccatgagctcatttgatcagatcctggcaggagtgaaaactgctttggctagcagcggacaatcaccgaaccgcaacctcacaatcgccatcacaacactctacatcaactttgcagtttatcttacctccgaaggtagagaccaatctccagaatccgcagaacgaggtctggtcctcctagaggaactaactcagatcatttctggagagaaggactcagaggcggtttaccgagcactagtcgcgctcggcacactggtgacagcgcttggagaggaggttaggagcgctgctacagaagtctacgaggttaaaggtattcttgcgagagcctcggcctctggtcctggaaaggagccgcgcatcaagggcattattagcgagatccgggaggctctctaagagtgcgtgctattttttttattcggtatgcgcagattagagatgcattccttcctaacgacgacaacgcgattcccaacaaaggcaattcatatcctcattttccacttcacgtagatacatcatagatgtttccttatttttgaatcaactagcattctgaatcattcattctaaatcattcactactcccttacaatctgccctccgcatcaaccccaatctccaaaacctgatcaacgccctgatacttgggcaaatcaagcccatacttatcagtaatgttcttcgtcaaaaacctaccaccgataaaatgcctgccgtgataaaatgccacgcacggcttaggtgcagacaaactgatcaacgcatgcggcatgaacttcgcaccgggtccttccttcggtggtccggtctggatatcccacgagctgggcgcatcgacactcagcaccgggacattggcggactcgatttgcgagacgattttgtcgaatggatcacgcaatggtccgccgaaggagaagccgaagatggcgtcgaccaggaagtctgccgtcttcagggctgcttcaaagtcgtcaacgaaggggactgagaggttatgcagttgggttttgaggcgctggcttgggtcagattttcttctttttttttttgcttctacgatccttctggtttgggattgcgtacttcataaagctcctttttgccctgctttgggtagtacagcgacggggtgtagccgaattgggctaggtggcgagttgctacgagaccatccccgcctggtggtttgttaggttgctgttgctcgaatggcaaggttggagatacttctcaccattgttgcctggtccgcagacgactagaactttcttgcctgcgcttggggggtggaccctccagactagttgcttgtatcagtatggcctgactacatgctcgagattgatggttctgaccggcttccgcgacagagaggcctgctagctccatcaactggtccagagaccagccgccgacctccatgaggtctttgtcaagtgacgcggcatctttggctgagattgcctaggaacatggttaggttttgagatggagctaatatcagacaactataccttcaacgacattattgctggtttactgtagcgacgaatggagggaggtagacggatacgggcgaatgtagaccggatcatgtaagtactttagatatagtctttcgactaaatgagcaattgacagaaaatgtgtaaatcaaaatgacagccagctctgagtagatctactgagggtcctcacgtcattacatcatacatcatatgggcgctaatccatatttggctccatcggatcaacaataattccggcctagaacttttgcggagggcagacgggatcatcaaaagaacagtcttgcgctctcccaattgaaacagcataacgcacccgccaagatggttctccggattcgactcgcccgctttggcaacaagcacaaccctttcttcaacatcgtcgttgcgcaagctcggtacgtggtctttcccccgtgaatggatacccccgatacgcccggcctccaacgccaaacacggacgttgtcaggccaaggagtgcttcaattgtgcacatatctaagatgaactgaaattgaccctatgatcttcagctctgcccgcggcgccaagcccctcgaagtcatcggcacctacaaccccatcccgaaacgtcccacgaacttgtatgatgagaataccgaaacccgtccatataaggagattgccctcgaccggtcacgcgccaagtactggcttggtgttggtgcgcagcctagtgatcccgtctggaaactgatgagcatggtaagcacccttgtttgtttgatccgtgagagttttgggaatcaaggatctggacggctattgtcgggccttcgttttaagcagatcacatggacggggattacgttgttattatacggactgctttctgactcttaacttatcttaggctggccttgttgcgcccaaacctactacctttcacaaagcttgattccgactctttgatactgtgtctttccatggttttcacctccgacattctttgtgtactcggacggccaccatccgggaatttcaaggcatggtactatcagaagtcgcgcagtgtttctttattctttcctgatttggcatttttggcgttattgagttgccttgtgagaacctctgtatattaagtggcagcctgactgctctgagtctacgcggtagatgagccgcatgaatatctactgatatgacttgaatttgtctaggcggcacatacttcggaccgaggtagcctataccttaccagcatactttccataaactgctcatatattgttgagtcatgaggtacatagatgctactaaaccacactcgactaggtaaatcttaaatggatcggataatacccttggaacccgatcgtatttgtcagtaaacctgaaagtcaaaacatttgacgcgcctatgaccagttcaggcacgttgtgaagaagtaggtgctagtaaagcccctaaacagcggcttctctccacggcccaaccaaatgaactatcggccgctcgataagcccgagtcatttccctgtcgcagccaatcccatctgttgccggggttgggcccgtggcaattggtcgatgaccctggaggatcaccgggttttgactttttagattccatgggcgtacaacgtatgcggtgacttttattattataaaatgggttggatatgtgatgtacgtggtgatatgtctcatgaggtagtcgatatcgagccgttggctattgcaatctgggctggttgaagtagatatacagtatccaaggttccaataatcggtattgtattgacttggtaccagcttagggttgcctatccgagtctacattcaataaacatgcacctagtatatgtgtgtctcatttcaaagagccccatcgcgtgcagagccggggaacggtaagccgcttaggcactgtacttgcatggccggtgctcagcgatatattcatgatccaccgatcttcagagaacagaaaaagaaaagaaagaagagaaacaaaaaccggggcattccacagtcaccaccggtcacctcggggcacgcactgggccagtgtctgcatgcggtcggtttctagggccaaaggtgtaagacggcgtaaaattgagtccagattgtgtaaagagtgtgaccaggtactgtcatatacctgggagtacatgcagtcacgggcagacatgcatagaaccccatgtaccgctctggtcacataccggttccccattgagtcgcgtcgtgaagggcagatccatggatctggcactggtggactggcactcgaccgttccggactcttttcttccccccctcccctgcactctccttcatcccctcctttcaacccttttccctgcatccatcttaccattcgtgtcaatttccatctttatctcaatcgttttcaaagcgctcatacctgtcgcaaatccgatgagacaccattcgagtgcactcgactttcgatcgaatcgctaatcgccttcgccttccttcatttctgtcgttgcatcgcgcttggtgtacggtatcttgtcgcattaccgatcactgccccgacctccgactgtcaaaaccctgcgactccttttttcttcattaggactatcttccccctgtgtgatcgcgaaaccctagaaaaggcgaaaaaaaaaaaaatccaatttttttaaatctcgtggagggatgagcggcagctctagccagtccactcgtacgagtcccggctcttttggaactacgcagctcacagagtccgtgtcatccggttcgcccccacagcagtcactcccttcttcgcaggtgcctttgacggctcagcatgcgatgtcgaccgacgtgtacagtccgaatgcgtcgcaaccgccttcatctatgaatccatctttctcataccctttctcccctatcggtacaacagcttcattcgataccaacatgcgcttaggcgataacgatcgcaacctccagggtctaaatggcctgaatcgcggaaacggaggcgccattctcatgcgcaaactgccgcgaaatacgagccgcgaagccctgcgcagcatgcttctcttcgccaaagactttgtcgacgccgactttgtcaccttggacctgcccgaggatgatgggttcttgactgcgatcgcgcgattcattactttgccagccgccgaagaggccagatcactcctcgatggcaagccgaactccaaaaacgacgccaacatggtcgtcgagatgtaccccggtccgatgggcgcgaatctgtccaacacccgccgtaacaccatcgatcacaccgccacccgtgcgttaatgggtgcctcgaacggtcccctggcgcgtcaatcctcgcgctttaacggcactttccaaagtttggagaggctatccaacgccaaccccaatcaggctattggcgaaggacttcctccgacctccgaatcgcgcatgcatagccttttctccccacaatctccgatcggaaatggcattgataaccttccacgcataactgggaagtctatgatcgatgaggacccggacgaggagacgggcgagctgctcaaggatccggtgggctatgcggagaacggccattcttccaatatctccgctgggcgccgagcgaccaaccctcaaatcccgaccaaccgctttgccaatatgtccctatcaaccaacatgtcctcgccacctttgcagaactaccctggaggtggcgcgcaacgcatgggcggtggaacacccacatctggatacccgaaccaaggccatggttacccatacaacgctcagcataccccacgccacagcctgcctgctgcgaacccgaatgacctgaatcctccttgcaacactttgtacgtcggcaacttgccgccagacacctccgaggaagaactcaaggcccttttctccaaacaacgcgggtacaaacgactctgtttccgaaacaagcagaacggacccatgtgctttgtggaattcgacgaggtcgccatggcaagcaaagcactcaatgagctgtacggctacaagctgtcaaacagtgtcaagactggcatccgtctcagcttctcaaagaatccgttgggtgtgcgctctggtcaacccggcagcatgaactcatccaactcgccctctgggcagggcgcagtccccggaggcagcagcttgagtggaatccacaacaacatgttctcggccgtcaacggccctcctcccggactggcagcaccccctggtcttggcatgcccatgcctgcgcctccgatgcgcaatggcacctccatgcacaaccccgtcaatccgcatgctcaaatgatgggcaatacttcatacaacccgaactcgggcctgggaatccgaaacggagccaattccatgatgatgtcgccgccgccccctcctaattccggcggcaacaatccgacaccgaacctgaacggctataattccttttaccctgactacatgatgggtcgctaagcccatccaagcgttatattaagataatgcccggcatgtttgaacgaactgggatatctggcgcatttggggatcttcgtttcgtgagctagatcagcattcggcggctgcataactctcgggagtactgtttcggatttgctttctgtttttttctcttcttttctgccagtgcttttcttggctttcgtatttctgttgcatgggaacctgggcgctctcacattcctttttgtgttaattcgtttcattgggaggattgcatttcaggtcattgccaaacttgtattcttatctggtcggcgcgaggcgctcgagagcgcatgttagtttctgtcggccattgcgttttgttcacaccttcataccctcttgatttcttgcttttattctcgtttatctcgctcgttaccttgattcgataagcaatgcacactaatgcgtgtttgctgtatgcctacccaggatctatacgagctgttatctactttattccgtgattccccctgtttgttacatctatcccctggatctttctcgatgcatcgtctgcgtggatcggaaaggatttcgctgatttacttgctttatctattgcaatgcgtgtttatttctatgcaagtacgaaggaagggtcttatgtggctttctttgacttctcttctaatatctctctactcaaatggcatgagcgcgaaaggacatgacatcggctcacctcgaccacatattgtcccaggcgttcgcgttggttttatttctctgccatattcttcctgtctcggcggagacaaaggcgtccggtccatgcatttgctcgacagctcctctacatcttgcttgcattgccactcgttttgctttgggtctggcttactctgattttccaggagaagaatggaagcgtggcgtgtctattttttttagtcttcttcttatcccgtcttgctcgggggtatgataccgatacatttgcttcgatctgtacttgatacaatgaactggttccagtgaatctggagaatgaactcattaatcctttcataataatgttagtctgtaagagctatcatggacttttgaactcctttggccacttttcgtatattttaggatctgtgaagtcgaccttggaaggctttcaccgtaagattaggtagatacatatactcaggtgtcccaatatactccgtacagtatgagaagatgtttacttctgtacatattcagtggggataggtcacgtgatgacactaccgagagaagtttcttcgcctagacacctacacttcccgctccaacccgacaatctcccatccgcaattgttgctgcaaaagggtcaatggcagctggaactccttgattattattatccagcgtcttccattcagttcgacatcaaagtttccctcccattcacccatcatatcctccaagatgccaccccggatgcagagccggagtgtgtccaacacccttcttccctacctcacagctacctcctcatcctcactctcttccattccttcattatcctcttcatcatcacaatgtctttcgcgccaattttctgccacggcagcaccacaggcacagaccaagcttcgtcggcaaatgttcgaatggctcaacactgaaggagccgttttcaagcatcacgtccctggcgaaaccaactatctgactcggttaaaacagcgcggccccgaaacttcctcagatgcttcccgtccgttccccaacaattcaagtttcatcagcgagcctatcctcagtgaggagctacggaatgaggtctatcaccgcgttgttgaacagaagatgagtcttcgcgctgtcagcgtacatcttggaattgatatgaagcgtattgctgctgtcgtgaggttggtagaattggagaagagacaacgcgcgcaggtaagaccattttcccttctgctgttcccctttcccctttcctttcggaccctgcttcgaccctccacgcatatgatgagtcacaaaaaatcgattagtcttgaagacacccacatggttaaaccttactttttgaactgaactgtgttaccttacattttggattcctatcaccttttatttggtcgcttgagaactgacgaatctcaattcagggtaaacccctagcactgccatatgcccgggccatccacgagatggtccccaccacacccctcgcccagcaaggcgagcgtcaagaataccatgaacccatcaacgacctccccgcccatcctttgacaggttcccaaatcttctacccagttcccgaatcccgctccttcacccgtgtcgaggctggtcgcgtcttctccggcgccccagcaatggagcactccgaggccgcggaaatctcccacccctccgacctggccgaaaagatcatcgaggaccccaactccatcgcctgggttggcaagggcgccaacgctcgccaaatcctgcagcctgctgacgtgcgcattcctcaccctcacatggttgctctggagcgcgaccgcctcgcgcatcccaacgagcgtctggccgtttcagaaaagcagtccaagagactcaagcgtcaggacgcaattgagaaggagcgtcgtgagcgcttgcaggctcgccgcgagaagaagctgactgttgtctctcccgaggactcgcgcttcgactaccgtatcaaggatactatctacactccggagacgactggcgctgatggccgtggttcgaaggctgttggtcgtcggtacggtgtgcctcaccgcgaccgcacacgcggcgaaatcaagattcctacccgtgtggaggcttgatttatttgagatggtcccttcaaggactgtttcttgtttttttgtgtttttcagcaactttttcggctacggcctttgtaattttagtatgcatactcatccaaggatgtatgatggaggatgtcgcttatgtactataaccggatgatgtcgaactctttccatttcagtcacctcttgccgcttttaccactcgagtacaactggtgagccttacataatcacctctctacggggataatattaagagtgaagaggctttctcccatagaccgccactctgctcataattagtactcgtacccaggccattaaaaggggatacgttaaacccacgtctgaacataagcatgcaacttcttatcccgcaactcccgcttaacaaccgcattatgaatcttcgcgacatcggcactccagcccagcacctgcgtatacaagcgcaacgaataagaatcaatagcctgctgcaactgcacagcctggtacttccccaacgccttcaggtgcggatcgcgcggccaaggcgagaacggcagcgcgtagaccgacaagcgcacgtcctcaaagcccgccgcgatcatccagtccttgagcttgtggtagatgttcagctcgcggccgctcttctcgccggcgaagttcactgcctgttgccattccatgagcgcggaatctgatttcagcgtgccgtcgtcgctgcgggcccagacggcgctctcgtgcgattcgaagtacccgcctggtttgaggtggtcgtagatttggtgtataaaccccggccagtcggctacgcatctgcgtggtgtgttagtgttactctcgttagtatagaccgcgaatgcggtaatgatatcagttaccctgctaggcatcgtgcgtggatgaagtcgaagtggtttcgttcgtactgccattcgctttcgaagtcctccatgatgaactcgatgttcggggctacccagatcggctggatagggctgatgtcattcccaatgacgtgggcgctggggaatttcctatagtctggggtttagtcttgccgtatataaaaatggacgatgaagggtttcacatactcggcaatgtccatagcccaaatgcccgttcccgttcctaggtcaaggatgttctgcggtgatgatgtgatcggggcattgtagagctctcctcctagcagcatcagccatctgcgccgcttggttagccacattcgttcggtcgttcgggaatgcgttgctacacggacatgtgatgtgtctgaagaaagagtcagtgtgtgcacatggaaagtcattagttagttagggatggcagcgtcttaccagatccattcgatcctgctcctcctcgtcattcggcatcctaactcggtcagcctctacctagaggaacgtatgaaagtgtgcaagtacatataacctccctagtcgtcgatcgattggtcattgaagcttagtacgaatggtatgtatgtatggactacttaccgagcgggtactgcaataccgccgaccattttcatactcgaattccagcacgctctccgacagggaggtgagatcggacagctcgtcgtcgaattcactgttagtgtcctacaagtcggttaaattcccggtgtcgcgatgggccagacggtcgagtgagtctacatacgtcgccaaaaatgtcgaccgcgattggagccgcgttgacaggggtctgcgtgtcaggctcggcgttggttgggggtacagatggggctcgttcggatgaggaagtatcagaaaccattatgatgggaaaggagagcaaaagcaacggcgaaatttctagaggaaacggcgctggataaataaaatctattgcccttttctaacagcctcgcttgccgattcatttgacgcgagtggagggcttttgggttttatccaaactgtcgggttcaaaggagacggggactttggatctatcgtgcattctgtcgcctctcaatttgctgattgccaatgggaatcactggaagaggttggcaatcaaactccactccacatatcgttgtctttgaacccattggttcactggttaatatcgaggtggcccttgacaaagaataacgggtcttggtgcttcactatgatgggtttaaggtctaccggtcccacgtgacagcgtgctcagctttactcgggagcggaaagcggcatggtctcggcactaaaacggaaggtacccggacattgtatgcctcgtctttgtacatggaactctctaggactgaagatgtctgaggtttttgatctattgtactggagtaatcgcagttatttcaaactctttatcttactgttctggtggtcatgccaagtacttatccgcgttcctactatatataaccaataaacacttcgctaatgtcatacataattcattccctaaccaattctacaagctcaaaggaaacgaaacaagaactcgaaaacatataaacccgaagatatcaaaatcacaatgcacagcgcttcgccaagataaaatcaaatataaagagcgacagatatgaccagcagatcccgctgttccatccagcctccattcctcccattctcagtattagtcagatactagccaactctcaacgagcctccccgacagatcgacagcgtcgtcttctcgccccaacccatccagagatcgcatcggactcagagtcgtcttccttggaagaagtctggaaaatagagccgagtgaggcgagggcactctggagccatgaagtagtagtaggggaggctggagcagatggcatatttgctgactgcatggtcgagctgggtgaggggtgagatagtgagatagtgagatggcgagatggcgagatgcggggtttatagtttgtggttggtggtttgcgagaggaggtctttggtaaatggtatggtacctggtctggaagacaatgatagacgatagacaatagactggtatgtaggatatatgtaggggttggaatgtaagatagagagaggttcagggggtcagcttatggtatttaaggaatcgaagacaatacgaacatcacatgcgaacaatgcccagggagacgacaaagcccggatctggatcacctgcataagtacctaaatccgggcttcgtattatttgctttcaacggttccccgggttgcttctcctacttcggtcatgctgctttctcttgattggtgatgtgatcatcgcattgtacagatttacgtattgattcggccttgcacatagggcttgttatgcgatcgtcgcattggagcaacggctattggacgagtctttgccttgagaggcgttgtactgcgttgtactgcgttggatgcgagcagatctgaaaagagtaaattgtatacaatgtaggctcttggttatttgcgacatttttgtctcggtccttcgggagtatcgtgagacttacatatgttagtagagatagacagaagccatacatcgtataatttcaaatggctaggtgtatctgcatggatcatcacccctcaaataattagtgagataagtacaaggtaggagaatacaccaaggcctccagccggcagtcggaaacaaagaaaattatacattgaagaataaaagcatggacatctcgttcgtgtatatgaggatgtccattgcatagaagttgtatgcaaaagtaaatatcggtagacaaaagaagccagccacaaaggcaatgtgagcggcagacgcgtatgcatcgcaaaataacaaaatatatccatatggccaaaagaagatccacgaggaaaaccatgcaccgggtctgaggacctcgaagtgaagtgcatgccaccatgacaaaaatatgaaagtataggaaaagagacgttgctatacggggtattcaatgggagagacagaaaaccaaaccaaacaggttgaaaaaaagagtgatgggagcgtgtacggaccaaacaaccaaggtatggtaactcatccaaatacagatccgtcttcattcttcatcaagaggcacgatcgtcgcatcactgcctggcgcgccgtctcctgatgttgaatctatactgtcgagacttccgctaccccatgaatcctcccgcatgatttgcgcggcttctggtagggttggcttggtctcgaagtgattggacttgttagcgggccgggggatcgagggcgatgggggatccacccgtggcggttctttgcggtagccaccttgcatcgggctggatgatgtatcaacagttggcgaggcggcgcgaggagaatccatgaacccgcgccatttgcgccagccttcaaagtcaatcagggcttgcatgcagccccattctgtaaccttttgctcaagccaagggaatccgacgggctattcgagacatattagcatattatttggaagaataaaataggagatgatttaccttggtcaagaaatcattgcagccagcagccaatgcctcatgtcggtcactttgcagactgctagctgtcaatgcgacaataatgactggactccggaacagtgatagatctgacaaagtgtcctcttcactgaccgtacggtgaagcccaggtcttctctccgtcgcaggcgtactggacgcgctgaagcggccagaggctgtcttcgggaagacaccaatgccattcaagcgctccaagcgccggatctccttggtggcttccaggccgttcatcacgggcaactggatgtccatcaggaccaaatggaatccaccttgtcgccattttcgcaccgcctcttcgccgttcattgcacacttccagcgcaccttcaaccttttcataaaggcctccaaaagcttctggttgatgatattgtcttccacgatgaggacattgattggcggaacggtgccgtcaatcaacccgccaaacatagcaccaggagaagtggctgctttcgtttttcgcatcacgcgtggtgatgccgttgccgggggagtgtgtgatttcacctgcggagactccaccggcggtggtgccgcggggggtgtaggcattgagggaggaggagctgggagaggttgggaatgaggagtagggccagtttctaggcatgtcagtggctatgttaagtaaaaaaagttttttaaacgtacctgttataccgggagtttgagtgttctggttgtgaaggatagtgggagaatttgttctgtgtcgtgtcagaggaggtcgctgatgccgtgccctacggctgcccggagatggcagtaaaggagcgacgccagtgttgaggatggaaattgacggcgcattggccgctactgatggagctcccgagtgtgcagaaggtgttcccgcgttcaccttgaccggcggcatgagaggaaagtaatcgccatgttcgccgggttctgattggtggtactggtacattgaatggcgcggcgatggctttggggtccgccgtgacggggcatcgatcaccaatgcttcctcgatgttctgtcctccagggtagtatgcatcgagtatagatattaggatttcctccgggctcaagagacgctcagtgagacctggtcgattcgagccctctcgtggcaaaattcgaatagcaatatcaggcgagtcgaagcttctccccaatgaattcccgtatttcatgatgacatggtcgcgtagctcatctaccaccgcatcctctctgcagggcaccaaggtggccgagccaccgggccgtttgacccaaacccgacgtgtgaccatctcgcaaggaacaacgggcgtgaaaccactaggctggtctcccgaagaaaaaacactcgcgtccagtagcccactaatcaggtggtggtgtgtgtctgggagaagagattgccgacggatcgcaaggctcgggcgcttgcttgaaggaggaaagtaggaggtcggagggcgatcattcgtaggccactctgcaacagtatgcagggtcggagtcaatggagtttcgggcaggattggtgtctgagctttcaagtgggtggattggaaggaggtggtatcggaatgctgaggagtcgataacggaggagtttcaaggggagacgggagatcgcccgagataggagttggcaaggtagaattatatggctcggtcaacggcgtacaattgcgagttcctgtgtgaggctgttccgacggcgcagaaacagaggaacccagttccgggtttgtccctggggataggggctcctgtacctgaaggatgcgagaaggagtgatctcatccaaatgtttcgaagatgcgatgctataagctggggatttgttggagtcgagagggctcgaggggggttttcggttgaagtgggcactcggatctgcatccgcttttggagataatcgaccaagcaacttcgccttcagacgtgatatccgttccgtcattgtcgagtcttcatgccattctaagacgatagggggagaaaccagattctaggtaacggttgttctctgtcgatcgagataaagacaatctcgtactttttccggttcagacacgtcagtatagaccaagtcagagatgtcaaaggttaaagaagttgagaggggaaagtagcgacttgggcagagtcacgttagttgctgatctcccgggccaaaaaaagctatggcctttttaatatgcaaggattcggggggtccttgggcttttggggggggggggaattttaggggatatatgaaaaggnnnnnnnnnnnnnnnnnnnnnnnnnnnnnnnnnnnnnnnnnnnnnnnnnnnnnnnnnnnnnnnnnnnnnnnnnnnnnnnnnnnnnnnnnnnnnnnnnnnnnnnnnnnnnnnnnnnnnnnnnnnnnnnnnnnnnnnnnnnnnnnnnnnnnnnnnnnnnnnnnnnnnnnnngtgggggtggggggggggggggaattttagaggatatatgaaaaagtgtcttggattaaaattgggcatctcaattgttgggtttatttttctgttagcgacgagcatagatatagagctggaatgtagtatacctaagacccttgagcttgtatagctcgtcaactactcctatacctatagcactcttattgcagaaccccttaggtggcctgatcttatccaacaatccagataacataatacacgacacgattcacgattcacgatctacagataccccacaaaatagcctacgtggcacgcccaaaagtaccagagctagccagacgcagggccaatggttctcagcgtcactggaatattccgaagagcggcatctggtgttgcacttagtagcaggatataccatccatcttgtcctgtcggtggggcgtagaagttgatgttgtcctagctgcacataacatattttccatatgaagtccacacattggtttgtggtgtcgatgcgctagtcgtgtttgtagcaactgtgtctttacttgtctggccacttggagtagtaaatatgaccggacaagccattgcgccagtatccctcaatccaagcagattggtactagaagccacaccagctgtggtgaaaatggcagacttggtactagttgaggtagtatcggggtgagcaacccaagtgttttggttgtcaccaaacgttactgtggctaaatcggacactcatctcgaggactcggagttcaaggcacacaagaaaacgcaaacttgttggttgcatttgacatggccagattaccgatctgggcttgacctgttcggcaaatgattaacgtgatccattcatgggcgagatatgtttaccatctgcatagaagataggcagcccgtcgacgttgttaccatatgcatataaactccacggaccatcggcctgtcgcttatccattggatgcgctgagccaagtgcaaaaatggcaagagccacagcaaagataatcgaaatcatgtgttgaaattgatgttacaaagttctggtttgataggtatgtcatgatcaagagttggacgcgtttgaaatcgtcctctatatatccattatctggagaggtaccctatcatttccccaaaacctcagtgggacaaactcagggttgacttgtaagctgagccatatatgggatcagtgtgtcagaacttctgtcttggataccccggaatccttggtcttgtcctcccatgctgcctaacccatatcttaagaacgctccttaattaaaaaccacctccaatgctgacctggctgaacagacactgcccatatgaggcgcatggtcgcaccgtacagtatcacatattgagttacatctatatccatgctcgagattggctcgccatcatccttggcccccttgtctctgagtaatacacgagggtcaggcccccactccgaattgcgcctatgtcactcgacctgactttttcactgcccggagagattaactgacacacaagttcagggaccctgcgtcaggagcctgaaaaggaaaagatccgatcacgataatgcatggcccacgtggatgtggtcctacagatcggggcggcacagaactgcttagcttacatggctagacaccataaaatcttttgacttcacaataatggtcgatgaaacagatgtctcgctattgatgatatgcccacttgaataatctatttggcacagatactaagtcttgccccatgttgaaaccgagctggagggccttgtctccctgatggcttggtacatcatttttttaggctattatttctatttttgtcagttggagatgacggtatgccagcatctcctagtaatgagcgtggcaatttacgaggtgtattgccttagggttagagtaggcgttcgtaaaagatcagcttgagtctctgagggaggtatataaattacgttaactatctttctaggaagcagatatcaatagtcttattttgagatcctgaggtccagtcatcatgagattttcatccattatattcttggcaaatttacttggtgttggcattgcctgtgccgattgctcctacaaaccatcaaccacactgcgaccaatagccacgagaacccgacttcgaaatacctataggcctaccggtactccatgtgcaggaaatgcccccaatgacagatctgtttggtgcaattacagcattgacacagactacgagaatgtcgtcccagacacaggtgttacgcgcgaatactggtttgaggtcaaagaagtcacactctctcccgatggattcatggctccacgtccggccatgaccatcaatggcacctttcctggcccgcctcttgttgcagactggggcgactgggtggtcgtccacgtctccaaccatctgtataaggcaatgaacggttcgagtattcactggcacggtattcgtcagaactacacaaatccgaatgatggcgttccttcgctcacccagtgtcctattgctcccggctcgactatgacgtataaatggcgagctggccagtatggatcctcgtggtatcactctcatatcggtttgcaagcctgggaaggtgtatatggtgctatcattatcaatggaccggcgactgcaaattatgatgtggacaagggcgcattgtttctgagtgattggacgcatgaaactgtggatcaactacaccaagatgtccaacttcgcggtcctgtcaggaagttgtcaaatggactcctcaatggcaagaatgtctatggaaacggtacaaatactaccgggtctccgttccacatgaaagtgcaaaaaggaaaatcttaccggttgcgacttgtgaaccctgccatcgacacccattggaagttcactattgacaaccacataatgactgttattgcaatggatctcgttcctataaagccattcgtcacaaacgtcgtcagcattggaatgggttcgtttcttggcatccctatcgctctaaacatacgaatccagctaattttatacatccaggccaacgctatgatgttatcatcacagccaaccaggaatccgtggccgaatccttctggatgagagctataccagccgatagatgctcccaaaatgagatggccggcaacatccgcggcatcgtctactacggcaacaggcccaagcaaccgcgcacgcagtcattccccttcacaaacgtatgcgaagacgagcttttgacgaatctcatacctcacgtccccaaaaacgtcgatctaccagtttcgccagtttgggataggaacgtgacggtcagcaataccaggaacgcacagaatttcttccgctggcagttcaattccacctcgatgaacgtgagctgggagaacccgaccctgatgcaagtctaccatagcgatccgggattttctacttcaagtggcgtgattgagttgcctttcaagaataaatgggtatatctcttcatccaaaacaccctcgttactcatcccattcaccttcacggccacgacttctccatcctagcgcaaggacagcctgggcctgggaagccacaatgggatggctctattattacgcagaatcccccacgtcgagatacggccgtgctagccggaggtgggtggctgttaatagctttcaagacgaataaccccggagcgtggttgatgcactgtcacattgggtggcatgtcgatgagggtcttgcattacagtttattgagcgacaagatgagatccgggatctcattgattatactccgtttaatgagaattgtgctgcgtgggataaatatgtcaagacgaagaatgttgtgcagcaagactcgggagtttgacaatgcggagtttgtgtgatgaactatacagtggataggatagagagagggttgtatgttagatatatgtatttcaattgagctggttgtaacgcctcatttttatcagattattttgatattctttcagggctgccgagattcttgtggctaggatttatacggaggaactggcagcaggagcaggagtaggagcaggaagaatgcccttttcaacatcctcttgtgcgttcctcccgagtaaaagtaactcatcaatgcttttccctgaatcttttgcctccttgcgtaattttcgatagcggattcgccaggaaacatggctgatatatatccctgcctcgaaaacaaccaccaaaatatacataatccccccaagtatgtcaaatgacccttgtgccgctataataaaaatgtgtaagctattttattatacgtattgctaggatgcagaccaggcctgacctaatgcgaagagagaaaacagcccacccaacgtgtcgatgcagaggaagacccaatctattaacatcagcaggtgtccatcaagcgctgtaaatcagaacaaaacccactgaagccaatcacacgcccgtctctcttccacaattcaaaatacggcggcactagtcctgcaatgaggataatggcggctataaccccaaccacgatgtcgggccatgtcaccccgttattatatggtatctgtcaagtttgattagatcttccatcagaaaaaaagaatagaaagaaacatggataatactctcaatgttaggatgagaagagcctccaatcccccaaataaaacaattgtgcctaagcataccagaacagccttagttttgctatagttgctattaaaattgatgagctgagattagcagttcgatcacaataaatccatacctgaaaccaactcactggttataatgaagaacttgactccaactaaccagcgaaaagaacccgaagatctgaggctgaatctgcaacgggatattgacttgctatagcaataatcataaagatagcggtcagcgatagatgcagatacaaaaaaacatcgaaattactagacaggaagtctgccaattagggtaattcaacttacctgcagaatcagatatgcgcccattggaaccgagcctacatgaatcacaaatgtaagccaattttgatctcgaaggtttcttttctttttcctcccttctccttcctatattaggcgacatgcttcatatatcaagagactcgaaatataatcctcgaggccctaaacctgatgaagggacagggaaataacttacagcttgcccacagaaacatcatcgctgcagggaatccatctgtgttcttacggcgccaattataccagatctgtggtatgagttggatgcaccagagaaccgtcccgatggtgccgaggacgttcgatgccagtgtgatattattctctgatgacattgtttgtgtataagaaacgacaaattagacaacaatatcacaatatatctaaaatgaaaatgcctggtatagcgtagatatccacaaaaacaactagattcgatgaggtgggctagtacttatactgagcagtcagcctaaagaaccaataactatcctggaaaatagcggaaatataatcggagatttaggacttttattacgaatcgttgagaggacccagtcccttttttatgcacatagtagcgcatgagcacagatcctctagtcgaaccagtcatggctcagggccaaatgcaagaatatgcaggcgagtatcgagataggagtgggttttgaggcctgttggtgaaatggacacacagaatgcagggtggtaagcacgagtgcagaataaaccaataccagactaaggaacgacaaggggaaaagggaaagcttgggagaacactatgcagcggtgaagtcttgacgtttgacaggctagtctagtcgatggatcttcgcgattagtgcatattggcctgtgacggagggggagatgttgcctagttacttgcctagttacttcgaaggcctggagtgagtatgataagaagaagcagaaaggatatgttgtcccgagatatatttctaccgattttgagcaaaaatttcgttcttagatataactctccccgcttttagtcaaggaagaactgcggagttgagtactagaacaagcctatcagattcgctcattatgggaagaggggcaaaattcaggctcatgagctaaaactagataggctaatcgatggagaatgagggctggatacgagatttagggctatatcatatagcgctgttcctttctggtgcattgcatttattgcacgtaactaacgttcaatgggggtaagcagaggaaagttactaatataagttatcagcattgaataaataattacacgctgaaaccgtttgaatattaatagaaacaataccttatgttgtatgcgccattctattctattgttcatcaattccccgacgcacacgtggctccagcccctcctatctgacagcgaacgcactctcagaaattgagcaactggtcttcattttctcgaataccacaggagtctagtcttgaaagttatgtactggcaatcccattagtcgctgggaaaatgaatgaggtattttgaagccagcgggggaggcctagattgctaatctgactctccgggctgcctgaattttaaataccgccttctttattaggtatagcaatatattctgccatagttcttgccggcgtcgaggtaaaagcggtacccgattaggaaggtggtcagaataagaggtccattcaatcttgttaacatgcactgtaatattgttactatactatttgataaattcaaattcgtgccaacaaattatgtgtctgagtcccattcactcctggttgcgacaccacctccagacacattcccagaacatcgcgcgtgtctctcggatcgataattccatcgtcaatcaacatcgagctagtagaatagcattctgcatctttcgccactctgtctctgaaactactcacctgtttcttgagtttttctggcgaaagagtcaggcctttggatttggcactggctatctgcacattttccataacaccagacagctgatctgggcccatcacactgcaacggccagtaggccatgaaaacaagaatcgggggctataggcacggccacacattgcatagttgccagctccgtatgaagcgcccaaaatgatcgagatatgaggcacggtggagcaactgaccgccgaaacgagttgtgcacccattttgatgattccagcgtgctcggccttagccccgaccataaagccagtgacattgtgaaggaaaattatgggagtatgtctggttttgtcagtatttggaactttgagtttcctgtctgaggcttactgttgattgcacatgcgaatgaactgagtggctttcgccgcctcattgggattgatgacggagagctggttggcaacgataccaacagggaagcctgaaaaaatcaaattagcgaacggactatcaacttcgatagtttgatcctacccataatatgagccgacgcagtaatcatattcgggccgtatttgggtttgaagactgagagacgggagtcatccacgatacgcaacaaaacttcacgcatatcaaatggctttcggatatcggggttcacgattgatagcacatcctcaatggggtatctcgggggcagtgacccaatcaacccgggcactgaggggacacgtgcttgaagggaagctacccactctcgtgatttgtgaatagcatcgaacctatatgcccgagttagtataacattttgacaaagaccagatccatcatactcatcagacgcaatttggtctgcaagaccggttgttattgcgtgaactttggcaccgcccagctcttctgccccaatgacttcaccagtggccatcttcacgagcggaggcccaccaagaaaagcttgagcttggttctcgacaaaaatcgtatagtccgacaacgctggatggtacgctcctccggccgttgaggatccgaaaacaatagcacatgaaggctttccgtgtctagttcggagggcaagatcgcggaatagctgacctcctttatggaaaactttgaattgttgcggcaaaaacacgccggcctttttcaattagaaatgtgagtttcgaagggtgtgatcatgtgtaacttaccgattgaactaaggagatcagtggaaggtcgttctcaaatgcaatctccatcatgcggttgactttcagcactgttgctagtcagcaattgtattgagaatatatgttttgttgcttcatacctgtcatctcattccaagctcctccactttgggtcggaatatgagacataagaagacatatgcgtccacaaacatttccaatcccggcaatcagattgccacatggggtggaatcctcattgccaaacccggtaaatgctccaagttccaagaatggcgagtcttggtctagcaatagcgcgacacggtcccttgctaatggcacgttaaccgcgtttcttatataaacggagagtaaactcacgtagcagctgaccccggctgatgtgtcttcgtagagaaacatcatttccttcagcggaaacttgctttagagcttcctcaaatctgtcaagcacaggtgtccaactttctttgtttgcttggaactgcgaaccccgaagatcgatattggtgtttgccacaggaaacgacgattcggtcgccattgtgaaaaaagggtttagatctgcacacaatacgtatttttctcaaagtaaaatatatttcaagcagaatgtgccgcatcaagaatgtctaggccgagtttctaaggttgactcgagtggaggccgtcggtccgaaccccggaagtactaccgggagcggtgcggaccagctggtgatagtgtgggggaatgagatggaagatcattgaaattgtataatctggtaattacatttgtctgattggaagctgcctttgacatgttataatcaaccgcttgttcccaacctttgacaagtatacaccattcccttaatcaaaataccccaaatggattccaacctcgcacttgtctatggccctacagagccccagctatgtctcaagactatgggcgctctcatcgaggaccaggcagcccaatttggtgaccgtcctgccgttgtctttccatggcagtccgtccggctgtcatatcgccaactggcggaccggagcaaagccctagctggagagatgcttgaaatgggactgcaccatggggactgtgtgggtattttggcaggcaactgctaccaatatgttgaagttttccttgctggtgctcgaatcggatgtcctgttgttgtgctgaacaatacatacacgcctgcagagcttgaaaatgccgtcctaaggagttgtaagtctgctatgagggttttctttttaaaagggcaacagctaatatagtaacagcttgcaaggttgtcttccatgctaccagcatcggctctcgggacctgacaggtcatatcagaatacttcaagggacacaatatccaaatccagcactccccgatctccgccggattatctcactcggacttggagaattccgcactggagctattgaggttcagccctatgacacggttacttcgaatagtccttctgtgtctataaacaatgcgacactcgagcacgcagagagacaggttactccccaagatgtggttaacttgcaatttacttctggtaagtgacaacgaaaatccagatttcaaactgaatattcacatatttcaaggaaccacggggtctccgaaagctgctatgctcacacatacgtaagtccgtgaaattggtaactacttggagcatgtaaattaatctaacctataggaacctcatcaacaatgcacaatttgtcggaagagcaatgcaactgaccccggaagatgtgatttgttgcccgccacccatgttccattgctttggtctggtgttaggatttctttcatcatttttctacggaagttcaatcgtctttccatctgactattttgatgtcgcaaaggtagtcgacgccatcatcgacgaagacgccacggttcttctcggcgttccaaccatgtacgtggccgagttagaagtgatggcaaagacaggacagagaccccggcgactacggacaggacttgcatctggatcggcagtctcacaaaatctcatgaaccagctgcgagagattatgggcgtcgagaaaatgctgattgcatacggaatgacagagaccagtcctgttagctttattacttccctggacgatagcgatgagaaaggtacaacaactgtcggtcgagtcattccgcatacggctgcaaaggtcattgatgaaaagggcaataccttggctcgagggcagcgaggagagctctgcacaagtggatttgtgctacaaaagggatactggaagaatgaagagaagaccaaggaggtgatgcgaagagacgaaaacggcgtcttatggatgcacactggagacgaagctatgattgattcggatggatatgcccatatcactggtcggatcaaagatcttattattcgaggtacgttcaattctctgatacaaatccccaaacccgctcttactgatgtttgctgccaacaggtggagagaatatcttcccgcgagaaattgaagaacgattgatgtcccatgcatcagtttccgaggctagtgtagtcggtatcaaggatgagagatacggtgaggtcgttggctgtttcttgaaggcatcggtgcagtttcagaggcccagtatccaagagctccagcagtttgtcggagagaggctcggccgacacaaagcccccaaacatgtgttttggctaggagagaaaggtgttggtgatgacttcccgaagactggcagtggtaagcatcaaaaacacatgatgcgggacattggaaatcggttggtgggtatgttcaaggcgaaactttagtatagaacagataattacatttatttgcattactattttctgttgcggagctctatatggatatatatcccaatgacgaatgcggacgagaaagagcaattacctagtatcaggttggcacaaacatcaaaacagccctttttctctccgatttgaaactcccttgtctttgcaatgtcccttggtctccatttttgtccgaacaggtattgccacggaaatgtgtgatttacgtgcatcccgtccgagctggtccactcctcggtccgagatccggatactaaatttccccgcgtggagtgctttggagcggaccgaagcagaatcggaaaagaagtttagtaatatactctgattaactaactattctattgtatgataagcgatattgaagttcaacatcctaaaattgagatcaaaattcgacaatgggtccggctgttcgaatcgtcgaagtcggtccacgggacggccttcagaacatccgagacacaatacctacttcaattaagttggaattgattcaacggctccagaagacaggcctaaaagctattgagctgacgtcagtcgtctcaccgaaagccattcctcaactggcggattgtcgtcaggtcttgcgtaacccggacatcaagagactcttggatagctcgcaacttcggcttcctgttttggttcccaatgctaagggactcgagattgccatacagcacggcgttcgagagattgctgtgttcatcagttctacagagggatttagtaaagccaatatcaactgcactgttgcgcagggaattgaacgggctacccaagtggcatccctggctatacgttctcaaatcgctgcgagagggtaagaaaactggtcccattcccttatattacaatccaatggcaactaacctaaacagctatgtgtcctgcattttcgctgatccgtatgacggtccaactccattaccagcagtcctccgctgtgtaaaggccctcctagatgccggctgctacgaggttagcctcggggataccctaggcgttggctctccttcaaacgtgcgcgagctcatcaactacctgaccagcaacggtatcccgccagagaagctagcaggccacttccacgacacttatggacaagccgtagcaaacgcgtgggaggccttcaatagcggaatccgagtgttcgacagcagtgtcgccggtctgggtggatgcccatttgcaccaggagcaaaaggaaacgtcgcctccgaggacctggtttacatgttccacaatgcgggtatttcaacaggcatcgatctcccaaagctagtcgaaacgggtgtatggatatcgaaacaacttctgaagaacaactcaagtcgagccggaacggctctggcaaccaaattacagctggcagccccaagcacacaatccaaaccaagagctcccggcctcaaatgggacctttgcaacgaaacacagggtttacagatctaccgatcaggcgtgaacttgaaaatcgtcctcaacaggcccaagaacggaaacatcctgacagcaaccatgatctcggatttgacatcggtgatctcaaatgccagttctgatcccttaacctcccgaatcatcattacagccaatggaaaattcttttgcacgggaatggacctcggcaagggaagcacagccgttggagaaggcggatcgagcagcgacgcacaatttacgggtttaacgcgactcttcgaggcaattgatcaatgtcccaaagtcaccattgcggcggtgaatgggcctgcgtttgggggtggagttggtttagctttctcgtgtgatatacggacatttacacaaggagcgaatgtcacgctgagcgaggtgaagctaggactttgtgcggcaacgatatccaaatatgttattcgagaattgggggttgcatttgcacgagaggtgatgctttctgcgagagcggttactcctggtgagttgaaggggttgggaattatttctgagattgcctcggaccaggagaatctgcgggttagagttgatgagcttttgattcgccttaaagctgcttcgcctaatgcttcgcggatgtcgaaggaattggttcgacttgcctgggcgcatggaggaggtgatgcacaagctgctgggattaaagggctatttaaagagatgatgcggtctgatgcagatggagcatatggcgtgaaggaattccaggcgaagaggaaggtagattgggatgcctatgttctagggccgaagcccaagctgtaaaggaccagattttttggttttagctagtatagacatttaaccaaggaatatggacaatatttgaactcttctacgagtcttctacaactcttctacggctgccgaaatccaccctcgaacgaatcagtagatggatcgaagccaaacccgttttgtggtagaggaagtgagtaaatctatggaactcctgaatttggatcgattactaatgaaaagaaagggattaactaattgactaattatagttctactatcatttttactatcttagagaagactgctcggttaccttactttctaggaaaaaaaaatatacgctaagtatgatagtagcattaataacgttaaagataatgtagcaacggcttccgatcgtagagaaaccaagaggagttaccgaagctatcaaaaaactgaaagcccacatggtagcagtggataccgcgttcactgcggcgcggatctgaagtagtaccatttccgcagcatagaggaatgttaggccgcaatagctaaccgtaaagatgaattgaaagcagtacaggaagaccacggccatggcaagagctccggtggtttggctgcagagggggaggtcgtgcctgcgaggcctgccatacagattgccatggccccagcactccacagcatgagagggcggcggccgagacgatcagtaatgaaataagcgatgtaaccaccgagggggagatagctgtcttcaaatcagagcaagaactccgtcacaaaattgaagttttgcagcccaataaccacgtctccctcccctggacccggaggacgatcctggattgcaacgaaggggaggaccatagggtccccatccataacatttggcattcccgcaactgggtttggtgtcatatccacaaactgtgcacagtatggttgctgaagtcgtgccggctgtctgattagtggtggaatatttggagtttgtgcctggagggtccggatgtaatttcgagttagcgggcggggagcaccgctcggagccaactgccactgctcgaaggagacatagttttttctaacaatgataagaacgaccattctgacatcaccttcagaatctgcgaaccacttctgggcatcttgtcgaagtcgaccaagcgattctgatacacctgtttcgattataaatgttgggtagccgacgtttccaatcggatgagtacaacgagagggaggtacatatccattatccgcttctttgcccttcctcatccctgatcggtaagttgtcgatccgatccaagccgttccttcgctagggacacccatagccttgtaagaatcccgaatcacttcagtgaacttatcagtggcgacctcatgttcgctgcgggggacgaccttgatcaggccggtagagccctcccattgaaatcgaaatgcgattcccccaagaccgccgtggtcgcttgtaagtgcttcgattaccggtgttgatagaccgagcaccactatccattgatttccgtctgtatgttcctcggaccatttggagatctggagtgcctctagacgcaggcgcctcagtcgtgaaaatgagaccacatgaccttgaggtaggtcagacatgagcgtggggttctctgccatcggaagtagaattctgtcagcatgtagattcagacgagggtttcgtcgacgagatatcacagattctactgaatcagtgtgtcaaggatctctgatgatgggtgacataatggaaataaagagggtgacgtaagttagttatggttaatgtaggtagaatattttcagacgcaaggttaaatccagaagaacgttttcaaggcggtattagcgattttgctctgctttgaaatatgatgagagtaagtcgttaggtaggagtagagaggagaacaagaagaatggaaggcagggacagcttcttatagttatctgttgtggtgctcacgtgccgatcacatgccaaatcaggcttcacatggctatttagttaactagatcttaatcattgtagagaatctatccttcttcatctctctctcgctccaagaggttataggccctctctccatcccatcagcattgtcctccctttgctaaaatttcatcaaaaaccatcaattttccatcaagctttgcatcaattttcatttctatcagttccagccaccaaagggcgctgtaactcgcttcataagcggtcgtccatagcttagacagctcgccttataagcggctgccctgaaaccttgggcggatttatactttccgccggtccggggtacccgaaagagccgtccccacaaactcttccccgcactggggagttcatccttcccaccttggaacttctcctgactcaaacccggccatggacatgatagattcaggtggtattaagcggatacgacaggcttgcgctaactgcaggtaaaattcctccgtcggctcttttttgccaatgctgatcacaaaccctctaggcgcaaaaagaccaaatgcacaggagaccgtcctatctgctcccactgtcgtcgtaatcatctagcctgtatctacgaaccatactcggccactctggcggaaaatccccctgcgcctaatccggtcatatcactgccgccagtcgagaataataataatgtcagttgggaattcctgggcactattgcattatattgatttagcagcaggttgaacttttgcaaagaatcagcacaatcgagtcaaggcttgcggagctcagcggaaagacaactcagcagtacgatattcatgtcgattttagttaccaattcttgatactgattctaggggtttctaggaatgtaacgtctcgtttttcacacacacaaggccacgtacatttatcaccagaggttaataccttgtcacagcgagtgccgtcaccaccacctacctttcaagatcatgagttcgtgttctattttatacccctgaagaaatttggccctgtactaagcgtacggatagactcctccctccaccacacgtcctacgctcagtaatcgacacgtactttttacgcgtccacaaccaaccctactcttatttccatgaaccctcttttcgccagaagttagaaagcaactctttaccaaaatgtttgatcttggcagtgctttcatccgctgtacgattctcgacccacgaattctacgcgaatcagacgcgcgacgcatcgcaaaagtacgcgagagagtcatggctgtcagttctggcagaccatttgacgatggaagacagtctgaatgttcatgtggtacagacggtaaacttgcttgcagtggttgactatacaggtaagatggatggacactctaatttacttcctgctaacattgtgctatttcagccggtcgcgcccggtcgggatggctcaaaattggccttgcagcccggatatctcaagacttgaacctaatgtcggagcctgatcaatggctctcttattcagaacaagaagagcatcgacgggccttttggtcaatttacctccttgataaattgatctcctgtggccgatctcgaccgcttatcattctagatgaggattgcgaagttcaacttccatgcgacgagcacacttttcgacatggagaaaggagacagacgagtacaatcgatcagttgttgaactggaactcgaagtttgacgaaagccccagtccgttttcactcgttcttttgatggcgtcgatatttggccgatgcacacgatacgttcaccagagtaagaatatggacgagattccaccatgggatccaaagtcagagttctctgcaatcaattcctctttgctactcttagaatcatattctaagagtttaaactggcaactttcggatgtcctctacggaagcgttcaggtagatggaacagtcaaccgacaggagataggccagcttatatttgcccacactcttttccacctgtgtcactgcctgctaaaccatccgttcctcgtgagacgatggctcaaacctttcggggccaaggccccagctagtttttcctcccgcgcccttcaagatggatgcgaccatgcgaaacagcttatggatctcataaagcaggctacggaccatggctgccttgttgaatcctcattctatgcatattgcatagctgtagctggggggattcactctctagccgtacacttcaatcggaacaagggccgcgagtcggacagttcgcactacttgcaacagagcctagactctttggagagattagcaaagccttggacccacgcaggaaatatagtaagtttacctctgctcagtgaagaaatgtcgactactaacacgtttttgattcaggctatctcgctgcgagaattccattccatttctcatgctttcgctgtcctcctggacccacgtcacttaatggatgagttagactttgggtccgaagagatcatgtggtcgatgattgattatgcgataatgggcgctgatcccagcaaaaagcaactctcacccaaatccgcagcgaacataccgtctcccacatcgtgggttcttggcgccggaattctgggacagccgggatatgacagccccaatgggaatatctttgggggtctcaccccctcaatgcgacttgaggaagtcgaacaatttctgaactgtagcccgggaatgaggaacattatctaaattgaaaatgtgtcttcggacgggaatttgcgactttcgcgggctcggtccgtccggtccgatgacatattccacgcatatcgactaggatgaatggataataagtagattctcggagcaaagaaaaggaaggttgaacgaaatatcctcatggctcaacaacatcaagcgtcaccctgggagggtgtcatctcgggtacgacggcggccattctggctagtgtgattgtataccctcttgatatgtatgattatggaccaatagcatgctttcctgaataattctaagtctattctagtgttaaaacccagttacaagttcacgttcaacgacagaaacagcaagatgccaacgatcgagaaaaacaaaccgacacatcagaaaatcctacagcctacgctcatcatgacaacttcatcgatgcaatcagctacatacttcgcgaagaaggtattcttggtctatacagtggcttgggaagttcaatcctcggcacggcgtcaatgaactttgcctatttctactggtcaacaaccgcgcaaaggttacaacaatcagcatggcacaaatatggaatctccgacacaaacagtatcgccaaggagctgggtctaggcgcaattggtggtgcaatggcccaactatgcacaaacccaatcgcagtgatatctacacggcagcaaacccggaaagcaactgatcggcaacgatcaatgtgggagacaatggtggaaattatccagagtgaagatggctggaccggactttggagaggcttcaaggtcaacttgatccttgttatcaatcccatgattacatatggtgtttaccaatggttgaagggggttctacttggactgaagaagacaaagagacttggatctgctgatgctttctgtacgtcttttcgatatatttcccgggctgtctgctaacatgactactttattagtgctcggcgctttatcaaaagttctagcgaccatcaccacgcatccgctaatcgttgctaagacaatgctgcaatgcaaaccgccagattgtcggaatggtaaaccgttctcgggatttaccgaagttcttgtttatattgtcaagaatgaaggcctcctgagactatacaagggcttggcgccgcagattatcaagggctttttggtccaagggttgatgatgatgttgaaagaacggtatgcccagtactcttttcaatttcaatatcacacatctaatatcacatttttaggactgagattttgatcagaagagcaatactacttaatagaaagcagcggctggcttctctgaagtaaggaattaggggcttggggtcatcaactaggctagaatatcgttcattcgcagatccggagtcggtgggataatttattacattaagtcattttatttcctgcaattaattcttgctcaaagcattttgtctgctgtaatgcgtaactggcaaatgtgcctgcgggatttgccatagatggttttagactactcattccaggcctaacacttgttgaattctaaagaactctcacaaatactttgttatactagacttttgttacttcaaactattcattgcctatgtggtacttccagcggttcggcttaaatcgtgctttctcctcaacttatcagtttaacataacattgttcaaaattagaggtaaaaaagctagaacgagagcgacaatataccaatttaataatgtggtcatcttcactaaggaaatatcaaagggctcggaaggatagggatccccggtccttcaccccggtccggcattgtggagcgcggtccgatcccacggtggtggtggttattgttgtatactttgtcactattcttactagaacgcattaataactatcctttcctaatttcttattcgctcattactccaaaataccaattagtgataacattgctcgctcccgctccgagatatataacacaacatccaagttaccccagcattaagttacaatttcgtttgatctactctcttcgaagtcccattacctatttttataaagaatatggcttctttttccactatccccttcgccgatcctctctggctgaaccgcggttacagtccgtactacaatgactcgcatcgccgacttcaaaaagaggtccgcgagtatgtcgacacctacattgcgccattttgcgaggaatgggaaaagcaaggcgttgtaccacaggaggtatgtacaagactgtatcaaggacaaggagatgaatatccgctaaagatttcctgaaataataggttcataagcgtcacgcggagctcggatacactgctgtcagctccttcccacttgcggtcaactatctcaatggtcagcggcttcctggggacatcaagcccggagactgggatggcttccacgacattgtcgtcatcgatgaattagcgcgctgtggatatctcgggattgtctgggcattgggatgtggtaactccattggagggccgccagtgatcaactttggcaatgatgatcaaaagaggagattcctcccggatatgttgaaaggaaacatcagattctgtttgggtgtgaccgaacctgacggtaggatttctgaaatatcggattgagtacattgactaattaaaagaacagctggatcggacgtcgctggaatcactaccacggcggagagaaatggagatgtttatattgtcaatggagcgaagaaatggatcacgaacggcattttcgcagactattgtactgctgccgtcagaacaggaggggagggaacccagggcatctccgccctgataatcccgctgaaggccccgggagtaacttgcaagaagattgaaaactccggcgtccatgcaagtggatcaacatacattgagttcgaccaggtagaggtgcctgtggccaatctgctcggtgtggagaacaagggtttccctgtcattatgaacagtatgtttcccctagatagccacggctagaccaaagccaattgtccctaactcttgacagacttcaaccatgagcgactctggctcgcatgcacatctctgcgcatggcgcgaatttgcgccgaggatgcataccaacacgccatcaaacgcgagacattcgggaagaagctaatcgaaaaccaactgattcgcgcgaagttcagtgcgatggcccgaggcattgactcggcatattcctggatggaacaactagtctatatttccgaaacagccaagaagcagggcgtggatgcttccatgggaggtctcttcgcaaatctgaaggtcttggctgggcagactctggaaaaggttaacagggaggcccagcaagtgatgggtggtcttggatattcgaaaaatggccgcggggcaaggatcgagcaggtcagccgtgatgtgcgggtgatggttgttggtggtggcagtgaagaaatactttcagaattggctcttaaccaggaagttaagagtatgaagaagttgagtaaactctagatattttgctatgttgtttttagttcaaatcgatctcacgtttgctcaaagtgactgaagaatcgttgcaaaagtacaagtcaagaatttcaaccttccagcctttcgatgacccttgggaatagggaattgttgctcgtggatgtgaatttacagtaccgccttcctgatcaggtatcatttataattctgctggagtttaatataaaggcggtatacaaattgggaggcggcggtaggtgctcaaccatattgggaaggcgataccgaagattcaggggggtggaagcaacaattccctacgaatatctccgagggttatactgcttgccttttgggatggaattgaacttgtattgatgaatatcgatcaatgaacatgctaaacaatcgaacaaagaatctttccttcctccaccgcatccccggtcttccattctgtttgaaacttccctgaagccgcgactgaaatattgacttccatcttcatactctcaataaccataaccgaatcgccagacttgacttcgtctccattctttttcaagactgaaagaactttgcacggcatgggagctgcaacagtcttttgctctgaacccttatttgcctttgcagctgatcgattactctccgcaaatgagagcagagtatcgcgtttgaattcaacatgagttccgatagaggggaaatgacaataaatccgttgaccacaatcgacttgtcccgcgaaggcatgggcccgtgttgaagggatagctacatgaccagtgagctttgatccattcactgaaatctcaatggtggatgtaagccaggaatcgggtagagctgggttgccgtgtgcagggacccatgagataacttggacttggtatgccggagaagacgttgctttgccggtgcgtaatgcttgactgatttcattatattgagcggagatttctgctgcggctgacacctcttcatcggtggtggtatttccattggggattgggaagagatatacatcctcaacgccggatgaaaccccggctgggcttgctttccaaatgcacatcacagcgttttcaggtgccgaatcaacctcctgtccagtctggctaggccaattgaccgtagttgtaacatcacaatggatattgactgggtcgaacctttggtttcggaattgcatgcggacattccggagaggtttgggtcgtgacaaggctgtggcgtaatctggaagtcgtcggactaccaagcttggaagaattgaggcgatggttttgaactcaggcagtccctggaccgaaggaggctgaagaagctcattcaggtgagatggaatgaacgcagttgtatagctaggatcacggaacgccgggttcaataaacatgatcgcatgaaaagttgatttgtcttgactccaacgcaagcggtctgcccaagaacctgagccattttctcaatagcaagcgctcttgttggagcccaaacgacaagcttggcgatcattgagtcgaaatagatagatactgatgaccccgtttggattgctgtttcatagcggatatcgcggcccggggctaaaggcccacttgctggtagccagaggtgaattttgccatgttctgggaagaattccctctcggggttctcagcacacagccggcactcgattgcatgtccattctgggtgacattccccagtgttggaaggcttttcaggctgcctccagctgcaacgaacagttgtaaagaaacaagatcaacccctgtgacttcttctgtgatcggatgctcaacttggagccgcgcattgacttctaggaagtagaattggttcgtcttgatatcgaccacaaactccaccgtaccagcattttcatatccaataagcttggctacccggacagcagtttcactcatcttttgtcgagttgcttctgtgaggaaagcacacggggtttcttcaatgaccttctgatgccttcgttgcacagagcaatccctatccaaaaatgaaaccacatgtccatgcgagtcacccatgatctgaatctcaacatgtttgctgctctcaatgaatttctccaagatacaatcatctgaaccaaatgaccgacgagcctcggattgagctctttccagttcaaccttaagctgtcccgcctcgcggacaatccgcataccctttccaccgccaccagcggaagccttgagcatgaccgggaatccaatctccgtagccactctacccaaagcctcggcatcttggctagatcccgagaatccagggattagggggacctcgggggcatgagcgcgcagataatcctttgatgaccgtttgtcgccgagagtagacatggcgctggggctggggccgatgaagatgagacctgcgtcatggacgcgctgggcaaaatctgcattttcgctgagatagccatatcccgggtggatagcttgagcacacgttgaaagagctgtttgaactagtagttcgatgtcaagaaacgggttgcgagcactgcggtcaatgctgccaatgttgatggcttcatctgcgtcacggacatggagggaagatgcatctctgggtactcattttagcgattgtcctcgatgatatgttggtagcacaatttctgagcactcactcgtcgacatagaccgccacggatgtgatattcaatttccggcatgtctggataatgcgacaggcgatttccccgcggttggcaatcaagacttttcgtataataggtcttccatctttgcccaagggtggctctgcgacaaataatggcttgcgaagaactgacacatcagtgcccttcggatcttgggtgaaagtaacagccatagtgtgatcgcggtatgtcaagaatgggatttctgaaggttcaaaagaagcagataatcctataggaaataccagctccatcacttcacaatatcaagtgtccgagctcttgctccggactccacaacttcggtccgacatccgcatatgtgtgggggaagccgaacccggaccggtcaacccgcaccacaatctttgcttggccacgcgtaaataaggccaatcgttgcgaaagattgaagatcaaatgtcggggcttttaggatgccttagcaaggagaccgtgggaattaagaccatgcatgattccgatactcttaaaggtcgtccagtctatattaacgtattatagcggccaacagtcggatgcttgattttaatggttttatggcctaattgggactagctctgaccagttctagaccgcctttgacaccgctcaataccatcttttgtaagtagtccgtacgcatttaagagacgacgctgtcactatccatggggtaattcaaatgtcttctacccgctgcaggctgatggcacttcgccaagcggaaaccagaggatacagagagtttggaagttcatacggtcggtgggaagaaatccaggcttggttttctaaacgttttgggccttggtatcggttgcgctatcagcttttctccaggaaagtccgggactacggcgggtgtgcatggctttaaatgtgggagattcatatgattagaggattttaacgtctaggatcgatgaaaaatattatttgaggaggtataaatagcttcatcgtttcaactttcaagtcgttctcaaaaactttggtaggccaacctggaaataaacaatgatcgcgtctattgtccattgccgaaagtcctccgttcgagaatttgcttgcagagttcttttttaagagaaaatctaaaacaaaagaacactacaaaacgcgatagatccaaatcaagacatacagcgagcaatagaaacacggtcgaacaactcctcaaaggcgagagatattcagccagtcattagttctacgatttcagaccgagccgagcagacagtccgagaatcaggacaatatctctcatcggagagctttgacccagcggggaagcgttatttatttcgcatcttgcaaacgaacaaggatgtcgagcgtgtagtcgtcgagtggttcatagtaagctctatccctcctccatcataatcgtccaatctctgatatatgttagaatcgaaccaatattgagagagtggcaaaaaggtttcgacgaacagtttcccccgatccgagatcacacctctcacaatggttcttgatatccactacgcatatgccgcgccctggaatcatgagtcaagggatgtccccggacgaccgatctaacatcataatctggattgcattaggaaagcttggccttgataatggatattctcacatgatggagagtgggcaagacatgagtctggatgggcatgagaaggtccatttttctggtcaagccgggggccttgccgtgtttttattattaaatatgtgacagaatatgagcataattgaaatatgagttatcggcggggaatggcatcgtttcaggatctagctggggagctcgtaggttagatattgatctcctgctagatgacgaattcattggattgtctgccaatacgtctgtcataacggcgcgtccaatgcgcttctacgaaagttcagtccgcatcacacgtctttttcttgtagtctgttatttaaggaagacgatccccttgtccttttaatccttgaactcccaccattgtttgtttggctcattcgacaaacaacacacgtagtcttcgactctgaggattacagcgatcttgataccatcctcgacttctgactgccaagtaagagggaagacatgcggtattcaatggaaggatgaagaatatattgttcattgtgactgaaaagatgtgaactataagttgctcataactggaaagtagggtactactggatagtagaagtagcaaaagatttcattatctgttcctttattcgatagcgccttcaatcttagagatggggagttcaaaaaaaggtaaaaccgcaataacacttcatttcttattctcttgttatagcacatgaacatgggtgtactcttcgtcgtgatttaggccctaccattcaatgatccctcgggccaacttgtccttttcttgactgaaacgtagagattgagtggacggacaagttggaactcgggatcatattgaaccttatcttcgtcatcgagggcaaactcatagcgatatactaattcgctgaaaagaatcttcgcctcgagaagagcaaagttgaaaccgatacagccacgtccccccatggcaaagggaagaaaagccgcacggtgacggcttttaaccttatcagtatcccaacggtctggttgaaattgggttggatcactccagtgttcggggttagagtggaggtcgtaaagagcgcaaacaactacactatccggttcgaggcgatagccgccaggcaaaatcacctccgtcttggttgttcgagcgggctgaaaagcaggattgtgaagacgtagagtctctttgacaaacttgtcaaggaacaataatttattcaccaaatccacgttccaatccgtgctcggtgtgacgcccatgtccactagctcctggagaagacggtcttgattgcactcgtaggtagtcaggcaaaagataagccacgacaaaagagaagccgtagttgcgaatccagcggacgttaacatggagatgttagggacaatcatcgaacgtggaaatgtctcccccttctcatcggtggcgttgatcaaatactctaccaggctagatgcatttagagctgcattcgccatcggcattttttgcatcgctccatcggatttctcgattttagccacgatttcctcgactagtgtgtaacaaagtcgatgcgattctctcaattttcggggatcaccaaaaggcagatttcggtaccaagatccgcgagaggccacctttttgttgagcgcaaacatgttcaagatcgacatgacgattggatgaaaaggcgcgtcaatttcagccaggtggccgaattcctccccgagaatgaccttgcccacagtctcagaagcaagcttggtcatatactgatagacgttccacgattgcatgttttcggaaaatgtgtcaaacacagcgaatgaacgtcgaacagtctcctgcatcagcggcgcatagtgccgcaccgccttaggtcccatggaagttgggaggtatttgtgagtaagacgccacgtctctgtttcggtatcactgacaaatgtagcgatgttgtctttcacgccccgaaggggatggtcgtcggtgattcttttagtgaagtgcagcgattcgttgagcactatagctgctatttcaggatcatccgtgagataatttgtctttcccatgttggtagtcttgatcaatcctccgtatttgcgaaagaggcgaaaatgattaccaaggtgatctggaaagatttcatagaagctacccaccaagggaagacctttcggaccagaaggctctcgtacaccatggttgccgatcctgataccgataggctcatttgaatctagcacttcaccgatcttgctgatggggttattggacacgtggaaggagacccctgaacgaattagtgtttgttcatcgagacattatccacaatggatcctaccagctggttgaatgatatggaaggaccgagcaacgacggacttcaagccgttcaaatcaagttcctgggcaacttcaatagactgtgccgtcgacgggtcatccccgatcaggaaaaagcttctcgatgccatggtctagcccagtcgttggaatgataactggtaagaaagttcgtgtaaccaaatttagctgtttggggacaggatcatggccatatttataagcctagtcaaacctgaaatacattcatcagtaaccctgcggggtgcgtttagcggtaccattgtaacgaattggattttcggtcgagccttgtaacccgaggctcggataatacagtaattccattccatacacaatattgagggtcgtttcgagtccaaacatgagtaattcgagttagacttcggcaagaaataaaccccacttgcctctcagaccctcagggtgccccgcacgaccggccgccaccttcaccacccccacccttcctgatcctctgagtaaagcacgtgaaattatactttcggataatcactgcatgtattcggtccccacgtatctacaagacgtggctcttagtgaagcatgcttcatggctggcagtaaataccttgcaggcgtgtaatgaggagtttttcgactgaacgttggacgaaacggcactggtaggttcactgaataaacatgggtattttccgtgtatgtgggggacaacaataggtataaagaggtcgtttcatcgctataattcctcgtgtacgaatttaaatcatctcgcccaagtccctgaacttggacttttttatatccgatctcccctggccttgtttgtccttcttcttcctaatggcccaatcgcgcgtgccaccgactcctcaaatggagttgcccagcatacctgcaaacgaagtccggttgcatcgcaaaacgtctgatgcgtggatgattgtgcacaacaagggttagtctccgggtagttgttgaatatattggtgaattatcatcacaggactgacgtaagattagtttacgatgtcaccgactacatggaggatcacccaggaggtgttgaaattctatttggggaagccggaaaagatgctacacaagtgttcgaagatgttggccattcagacgaagctagagagctcctacaaagcttgttgattggcgagatcccggcatctgtgggtttctccattcattcatccacattatggcaaaaggtactgatttgtctgttcaaggaacgcgtggccgaagtggagatctatcgaccgactttcgaggtgatcaatcagactacagccattaagacaaagtctcaaccaagcaatggtttggcaagtttttggtgggctgtcgctaaagtctgtctgatcggtgcctctggcgaagttgcacgcttgatttatcattatcgcaagcaatggccaggattcatacaagcttcgctgggaggcctgcgcgtatccggaaccaagatttggatttcaattggcatggtgtccacggctcagtttcttttgaccttcggactactttcctggggtgtctcgaagcttgatttcaagcaggatatgctttcatttccagcgtacagacgtcgacacccaaacacgttctttaaaccttccgccacccccacttcatttacatgccagcttcatcctcagacttggacgaacctcacactccgtgaaaaagctagaatctcgatgaacgtttatcgatttgtattcaacctgccgaatacaaaacagcctctcggcttaccatccggacaacacgttgcagtccgtgcaaaaactggaaataaagatgtcgttcgatcgtataccccaatctcagacgatcgagaaattggccacgttgaccttttgatcaaagtttatcctacgggtaccatgaccaagtatctggagagccttgaagagggagactgtgttgaattccgaggcccaaaaggcgccatgcggtataccagcgattattcagaaaaaattgtaatgatcgctggtgggactggaatcacccctatgtatcaaatcatccgtgccatctgcctaaatccgtccgatgcaactcaggtcaatcttctttatgccaacaactccgaaacagacatgcttcttcgagagcaaattgattcacttgcgtctcggtttcctcagaatttaaaggctcactacattctagtgaacccgccttctgggtggcagggtagtgtcggtttcatcacggaagatctggtcaagaagagtgtggtagcgtcatctcaaagctctcgcgtaatgctgtgtggcccacctcccatgctcgctgcggtgaagaaaattctatctgcccttgacttccacgaccccaagcctgtgtctcagatggaagatgaagtctttgtattttagactcgagatctactagcttcgagtttcccacgaaaagcatcagttccgtggatgtcaaggaaatttactactagtcgaatttgatcaaacgtttccagatacctgacttgcatacatacttcggcaatattgccgcgattggttgtttcttcgtgaagcgatgatgaagatagaaaagataaagcagaaaatgcgctcccctccatattgagtgaagtcgagatatcagatgcctacaatttatcgacagttggcgttacttaaggagtctgctcatgaataatagtaactgcatatttctttgcggtatcttggtattttgcaggaaatcgtaattgtaaagattattgtcgtttaactctcaccaacaaacgttgttcacagcaagttgaacaattggaaataaaaaagccccgcatgttgggcacccgccacattggggttgtccgccaccaatcccccgcaatccccttctattcagcttcgtttaatagcagtatttatatataacatcgcattacacaagctctaatgcttctatttggatggtactctgctcagcgaattctccggaaggatgagaatcaagcgttttcgctcgacctggggagttgatcccggccagaacctggatcactgggccaaatggttccctgaactccagaaaaagggttacagtatgtttaaggcgtatttctcgttcaacagagtgacagattgtcactgacaccatgcctacgtcctcaggcggggttgaagtaaaagttcttctgctacaccccgagatggatttcaagcgactgaggcaaatctgtgatcaattgggatttgaaattgctgtgatgtatgtgatctaagttctcaagtggataccctcgctgatatatatgaatcagagcgcaaacgtctttaccctccattcttggtccgcgcccgtcaagactgaacgcggacaaccatctgcagagatatcgagagataattagtttggtcaaccctctgaatcctgcagccattacatttcagtctggacagtaagaggctctcggctctcaaggacaatcaaaagcttattttctttctagggatgattgggatatcaaggaatcgatcaagtattttcagaggacaattgatatagacgaagagttgggggtttcagggcgcgtctaccacgagactcatcgaagtcggtcactttgtgcaccgtgggtcactcagtgtatcttacaggctgttccccggtatgctttccctgcactcagaatgacgtgaactgacctgctcatctacgctacagactgaggctcactgccgacttctcccactgggttgttgtcagtgaaagattgttagattccgccgatgacgaccgagccatggttgaagctatcatcccacatgtaagttcagggtcacgcgattaacgggaaactgacaccatcaggtgtaccatatccacacaagaattggcacaacacaagcctcccagtgtccagagcctatgcatccaagttttgagcaagagagactctcattcgaaagattatggaagagcatcctgagcaatcacttcaaaagacatggccacgacgcaaccattacatttgtaccggaatacgggtaaatcgtatttatgtctatgaagagaagacacaagccagctaattctaacacagcccattcccttatcaacccattggaagtccgaaggcctacggagaggtcgcggacgaggaaggacaacgtctgcaggctttattcgacgagtttgcggccactctggtcgctacttgaactcttagctttaagtcgcccattgcataagagataatgccatttcagcctgcaagaggtagaatatttttcgtgctagtcaatattgttggatatggtggccttaaggccgcgccctctcggtacagactagattgtcagaaaccaagatggatactatttctgtacagatgactattgttattttaattgaagatctttctgccatacaattcgaccaatacactcgcattaccacgatattccgtcttagatagctaggcagcagccctacgtaggactacttcaagtcttcatgtactatgtatataatgaaatggatagagatattcacccttttcgtcctcacgccattccaagcgatcgtatccgctctccgcagatggttggtcgagtttttactttcaaatcccttttgtgatttatggcatcttactgctaaagtggtgattcgaacgttcgctaccatcagtcctccagggttcggtgaggggctgggttaattgggatgtggcggtttgcgcgcccttggtgggacccaaagctaatctattgtggtggcatagcatctttgagctaaccctgaatcgatgttatatgccttacaaaaggtaagcaaacgagttacttccatctagggaattcccatattttgagcaaggtaaaatactacattcatgtaatcgtacccgaggcttgccctattgagctggacaccaagtaaaagccactcttgaactactccaatttatgacttgtaaggtacatgaatgggttgcagattttcattctactgtatcactttagggggtggggaattgatctgagttgtttaccccagattgtaaaatgcggggtttccccacaagaacttcttcgcgaacacacggacaactacaaaattaagttcaatctagaaccagggctgctgattgtatgtgagaggtgaattgctaccaggataatgtaaaatcatatataggcttgttgccccggtttacaccctactgtacttggacatctttgatacgtgttttcatcctaaagaatcacatcttgaacatttctatggccagtgaaaccaaaatgagcagtgacccagacgcgaatgacaacgtcgacatgatcgagcatgtccgcacgaatgccagcatcgccattcctcttgaggtttttgagaggcgataccttagcctcaatattccaaatgcaaactggtataagcgtctcggtaacccaacacctctgtgagttttggggtctctgattgttttttctcgagctcctatctgatagtgatatagcggacttgttggatttttaatggcagcgagccctttcgcatgtgctctcttgggctggggcggagcaggaggcggaggtgttgcgactatgtaagcgagaccaaagagtgaattcctgatgattatttcaatctgactggctctaacagaggattctcgtatttctttggcggcgtacttcaacttatcgcggcagttctcgagtttatcctgggaagcacttttccttccgtcgtatttggctcttttggtaagttacacggagatcatcacagaggtacttgaaaaaaattgacatgtcattatcaggggcattctgggtggctctcggcgccacacaaacccctaatttcaacgcccaggcttttttcgaaaatggtgaaaatgatgtggatatgagcgaatattacgctagctttggtaggtgttacccagtggaatggacggtaggtcgaattgaccatggctaatttactccagcatttgggctgatcttcctggctgtcctcgtttccatatacacgatttgcgcaacccgccttaacatcgtctttttttgtctttctttcaccctcaccttttctgtgatatgtcttgccgcgtcatactggtgtatggcacaggggaaggctttagctggagaacggctgacaaaggtatttgcatcccgaaagagacccgagattccttgatcttttgaacatctactaatgaaacgtccttcgcgatcaggccggaggttccttgctgttcatagtttgtttcctagcgtggtactatctggtttacttgatgctagattgtgtcaattttcctttgaatgtcccagtgggtgatctgaccagagtatatggtagagacaaggctaggaaccgtgagtgtgaggggatggattttccttgaaagaaaagtgtggatctaaaagatagacacttgtctttcttagaaaggccacttgatgaaataaccttttttggcttgaaagatacagggaaacgatcttgactgcaactgcctcatattgggaatgttgaaactagctggaaacaaagaagggagagaagtgctcttcaacgtcattcgccgttactcagaaacccaaggccggaaaatatattatagattgattcacaatatatgacttggttttttctgcttttatattttgtgtcactatctgacaattcgaatttagtatcacgggaaaaacttgcgactcactaataccgtttcactctctcacgtttgctctttctacaagatatgtgcttttcattgtatccatttcggaaatataccaggggattcaatacatggtcgaatgtacttcccgatacgaagttgcctgatggaagcagctggtggaaaattggaaaccagagatctagcaaatgagacagttttccatgattaaggaatagcggttattgtgtgacaattgagccatcttcagatctccgcaggttatggtgactgcaacagaggcactattgcaaaatctccgtcacggatcctgtaactaaaatacccaatgaggctcggacgtgaaagaacttcctagacttattatatgacttcaattattagacctatgagaggcttagaaagaataagcacattttggcccgaaactgctgctacgaagccctgatcgaggttttcagcctgagaataattaacaatattaaccagaaagattataacaaagataccaagatctgcgatttctacttgttggaagcagcaaaaagaatgatatctcaacacaaaatgttgaatcctattttcgtcaaagctcactccggaatggctccgtgtacattttaccggtgatcatcaaaacccccattagggtgaatgaggactttagtgtatccgctttccttcttgtcgaatttttcataagccatcgccgcatcagcgaaatcgatttcatgcgagatgacgaagctgggtttggccttgccggcaattatgatgtctcgcaaataccgattataggccttgacgttacactggcctgttctgagagacaaaccctatgagaaatcagtaacttggatctctcaaccaagggcaatgaccgaccttttcaaatagcttgccaaaactaaggctgattataccatttgcggaattggcgtcagatgatcctggatcgctaaagaaaggtagttgatgtgagacggtgctatcaaaatcctcctcgtggcctcttgcccatctccggattcttaccttgggacatagagcccaggaacacccattcctccacaggctcgtgtgacacgtatcatgttctcgaggacaatatttgctttttcggaggatccattggagtcgacagcctggtacccaactgcatcgactgaccggtcgaccataccattattatgactggtaatctgatcaactgcatctcccttggtaaaatcgatagggatacagcctatactttgggcgacctgaagacgctcttccacgcgatctacaacatagacttgagacgcccctcgcaagactgccgaataagcggccatcaacccaacgggccctgcaccgaaaataacaatgctttcgcctggtacaaatccagaaatttcgactccgtgccagcctagtattgtcagtccttaaacaagcttttgtgaagcagaaaacaaaaagcgaagcggggggtggggggtgggatagagctcaccggtagggaagatatctgtatttgtgtgtcagctatcgtttctcccataaatgtaaaatggccaaattacctgcaagtagtatgaaatctgcttcgtgttctttacccgggggtaacagaagggcattgaagtccgcgaaagggacacgaagatactgcgcttgaccttcatcatgacattagagttaagactcctggcctctgcgtcaatttttctgaacttacctccacgataagggcccattgcaacgtatcctgccttcgaggtcagccaagtaggtgatgtattcaattcttatattttaccgtatgcgcccccggcgaacccgggattgactccagtacaaaaggctgtttttccttcctcgcaattgcgacaccgtccatcggcaacgttgaaaggcatgacgacacgatcccctttcttcagaagcgttactcctgagcccaactcctgtacgattcccatgttctcgtggccttctaatattagcgcttcttctctactgctataccatcagatcttaccgaatgtgattcctggtttggcagcagttctgccctcatacatactggaggtgttagaattgagcagcatttcacagcatcttaggtcaactggtacacttactgcagatctgagccgcaaattgccgccttaatctctattagcgattttgatcttctgaaccaatgcgatataataactcacagacgtaattttgacaatgatgtcatctggatgttccagtcttggcttttcaacatcttggacttggacgtcgtaaggcccgacgtagttcaatgccttcatagtagtcacttgcatcgtgttggaagtagtggggccaccgtagtagaaattagatctcgaaaatgagattttaaacttcaaacaaagacatcgggcggcttttattacatcaactgaagacaatcgaggggtagaagtcaatagtccaggtggatgggcattctaactgaccccacatgggttttacgacaagaatgtatatccgtgaggggtagtcctatcaaacccaccccacccccacccccacaccaagtaaggtcatcgagttgctgtgaaatgggtactgaagcaagagctgggattatcggcttagaatgccgaaagattctggcctaggacaactattgaaggaagttggatatcgatttcggaagtcgtaatggaatgattcggtctaacattctatgccttcttccaacatcagtatgttgacgatcctacgctatccataggtgcattggacccgtcttgtagcatgtgtattatggctatattattatagattttttggggttatgacctagtattatagacacaggtctaacactaataaataaatagtgcgtattttgtacggaaagaacagctctcaccgaagctcaatcgtcaccttgccgtggaatggcaagaactagttctcttccagaagatcagcatatgccctcaagcttgcactgacaacatcgacgattccccagcatagattgccactgaagcttctcgtccagactcgaatgattgaacagctcagttgcctcatatttctcgggtcttttatcaattccagtcgattttctatagggagtttgattcccaggtcagtctcatcaagcaatcgtgtgatccatagatacagctttctctcgtgacttggcaatcttaccagtcccatattagggagggcccgaagccacgttgtcaaaagatgagcgtattcaagagcgctgagacagtgctgtacgctccagtgaaatgaataagttcttgctacgaagccaattccaagctgtatgggaatcgacaaagcatgaactgcatggagaagtgctgtgataaatccaggaccacgcacaacatcattgggtgcaccagccagggcctgtgcgattgctgaaggatccctcgtcatcaaagcacggtggggtccaagatcaatttgcagtcgcacatagatttgtcccagaagtgccgctgaagtgaatgcaatgggaccggagggattgcgtgggtcggtgctggactccggtgtctgcttccaataggacttccatgtccgaagcacggcatccattccggttatgtgatgccgatgagtcccctgctccagtggaagccgacataactgacgagcaaagaaaagttgctgggacaaggcatgtaagagaatatgatttccaaaagcagtgcaagccatttcaccaccggctgagctttctttcgccttaaagagcaaagaaatcgattcttggaaacatgaatgctttctattttgggccttttcgtacaccagtccccacgcacttgcactttgcgctgtccagacttcggctgagcagggcatattgagccccagatcagaattgagaatcaacgggggtgtgttatgcataagggagtggaggttgagaaaacagaaaacgacgaatttcgttcgcctgttagattcttctttggcccaacgacaccagtcaacatcatttgtgcgatcggtgatttcgaaggccggtttttccccaagcccatggacacggacgagcgatgcaagattaccttgcagagtcatcgattcttgtgccgccctagcatcgcctccccaggttgcatggatgaccagcagtagaattgcctgcatagcctccatcagctcggcagactcttgctcagagcgatcgggagaatgcgaccaaaatccggctaccccacggcaagtggaaagcaacgagctcgatagaaggtttggtgacgtaccataacttctttgtctcaggatctccaagattattgcttgtgctgcacaaaacaaagtcaacccttcttcgccctcaaagcggtactgtgccccacaggcagcaatggcaagcacaagcgctggattgcaacttccaatccgcagcgtcggggtatgaataaagggaaggtgctcgttgaggccatcgataaaaccatgaaaaaaccgagataatttgaactttgaaggggcagagaaatctccaggcaaaacgcactggaaatagttcagcccttttagaaaagaccgataatcagcctcgcggatattccgagtgagctgaattccgatggccccacctgacctttgggatctgtcttcttgctcgcccgattctggctgcaaggacggtagacgggacccgaaattagataagaagttctcttcggggacatgtccgtgtgatgaatgatcctctacatcatctgtagtggttgtgtcatttcgaaattccgtttgtaacgcagccacagggtcaaatggcaaaataaattgatcaattgattgaagtccatcgggtgcccacccttctgaaaagccgatactttcaatgaaatcggcaaaattttgcattggatcttcgattggtttcattattggacaaggtatcgactcctagacatactcataatcagcatgttttgtcactcttctgatatattttcagagcctgacctcatcaaaagaatcgagcctttgtacgttggaatttgcttcagtaggatgctcccaatccctttcacgtatttggagtgattgctccacccaaggcaacatgttttggctgtgaatagcagctattgagtgctcagctggaattggcataacatcaagtggggtttgtcttcgatccgccagcccctcattttgtccatgtacaagaagaggtggtggtgggtgtacaagtcttttatggcggatcatcaggtcactaaacacaattagaacctgcttggaagggcaataggcttaattgaacgaactttctgccaaacgatttcgaacatatgtcacatgagaacggcttgtcattggtgtctgtggtgtgagtgtcagcaatgattcaacctgtgttggcgaagtgaacggcatacgacttctgacgtgccgctgcaggtgttcggcgcgagaaaaagaacgctgacaatatgggcacaggggcggcttagcacggcccttcttgattctcttgggatctttttggcccggcatgacggtggattccatgatatgaagaccgcggctgagccagaagggtagggtccgagtctcaggaaacgtagttatgaggggcagtggggacaatttcgggagataatcggtaagggctgcccaggtggtgaccccgcattgaccgcctcccgaggttggttcggggccttgagaatcgtagcacgccaactgaacgtctgctccacgaagagacaggggtcagaggaacaaaaagtcgcgactatccgtaggaaagatgtaagaacttgatatcacctgccacagggcttcgaacaagatattgttcgcgaataataaatggcgttactagcaacgactggatggagacgaacagtgcatagaacattgacacatatttcatccccggtggaaatcgagcatttattcccggtcggatcaaatactgtttcaagttcagtgggccaagttacgcaggacactgcctgatcatccagcctggctggtatccacctagcgtgtaactcgctttggagaggagacatcgatactgccatcgccagtggaactaatgttctgactaacccggatttcacttctggacttggccggggtcacttcctttcgcgaactagaaattgcaaaacatttgacgatgacgccgatggaaattgccgtggcgagggtattggaatagtcatcattaagcgccttgacgacgccatcgccgacaaggaccctattctcggtgtcatcctcagcgcttccacaaacccagtcggagtctattacccggcctcactccggggcccagcgcgcaatcttcaagaaaatcttgaaccaagccgctgtggatccatatagcgttagctatgtagaaatgcatggagcttaactcacctcaacctgcattcatgaaacaatacttactatgatacagaggtactctagcgggtgatgccggtggaatgatcagtgtcttggatacttccgccccgacgctctcggaggtctccaagggccggacggaggagcaagctctctatttgggctcagcaaaggcaaacatcggccacggtggggcgtcctccggtgtctcggccctgataaaagtgcgtctgatgatacagaagatcatgattgtccctcactgtaggatcaagaccaaaaccaattccaagttcctgactgatctaggagagcgaaatgtcaatatcgctctgaagccaacggtgtgggagagaagtaccgacccttccagacctcgccgcgtcttcgtgaacaacttcagcgcggctgttggcaactcagtactcttgattgaagacgcaccagtccagaagtagctgccccttattcatattgatcccaaaactgtgtatcttatcgctgtgtcgcctaaagctggaaattctctctagggcaatctgcgctctctctttggtcacttgaggtagaaccctgaagtctctttggtaagctttcatacactactacaacccgtcggatatattataaacattgttttatacttactagctcaaatataactgatatctatacccagatcgacaatatactataggatactctgggaataacccggctaaagaatgccccgaaggtagtattcaccttaagtggccaaaggaatattcatgcattggtcgtacacttagtactatcattaaagggaaatgtataatatcaagtaggccgggtaaagttttattagtattgtattgtcccacttcggctgccgtactcaccccaagttactccgtacaacataaaattttagaaattaagcttaatgtgacgatctgccgacttatgccgactgactggtgcacctgcccaaccttgaaccgcgacctcgcacttaacattgcggtcgttcctttctaaaccgtaaatgaggtcggagtttgcatggcttatggcaaggtcgctaggaagagcacaaaacccagtcgaggagatcgtagattttctctttccctcctttatacttataatttggaattgattgtactcttttcttctggaaagaactagcatgtaacacttaaggagacacaaggacacttgatcttgatatattgtcagaatctgggattaataccagaatgaataccggcatttttcatcatagatacagatgggtcacgtggttgaccaggctagtctctcgttatcggcagggcagtcttcctctccactctagcttcttgtttcgtcaccggcaacaataccgtctaattgctcgcgctgcatgatggaatctgcgcctctggcgtacgtgccggtgtcagagcgaagcctctcccgtattgctcctcaaattcgcgagtcatctcaccttctgccataccgcctttgtctagagcggaaccctcttttgacatgggtatttcgtccctcggccgactggaatgaatagccgtaaggtctcgtgacaactgctggattgattcgttgctcatatagcctcccacttgcctgcttctccaaccaaggccccggttctttccgtgaagaacttgaccatttgcggagaccataaattggagagcatctccagtgccgtgattttcgatgatactgacgttctcctttaagtgatcatccgcccgtgagcaaatttcgaggcactgccgagtagtttcccactcgtcgcgcaaccttgatagatcttgagcatcctcgtcagaggatattgctgtccttgattttgcgactagtcgatccataatagctcgcatatgcttttccaacttgtttgccgtcatagccaagctatttttgcattcttggagaccttcatttgtgaccgttgccggtgacgcttcagatccggctgatcccagagatggacccgcatcgtcggacatcagttgaatttgatcgatatggttcgacagctgagcgcaaatctgaagacacttctccgtactcaagcgctcctctcttaacgaatgtaattcagccgcatcaggcccagactgagtcacatcgttcttagccagctcttccaacttcctatcaatactctcaagccgagctcccagatcatctttcgcatcttggatgaggctctcgtagtccccaatattttcaacagcaccagcggataagcgcctcgtaagaattagctacttgcgtaaatggaagctcagaaatgaggggggcgacgctgtaatagctcaaggtgacactcacaggtttacatcggttaaggcaatattgatagtggctttatatcccgccagcaagtcgcggaaatcgacaatgttgttacccatgtatgtcagcctggcccagtcccggaagctcgtgccggtactgtctgatcgcgatgcgcatttaagaatctcctgctggaactcttggcaaacattaccgcatcgcaatagtggcaggtctaggcacgagagatcgacactaaagttcgatttcaccaggtcgacgaggggagccagcacagcactgagggcttccagctcggcgagaaggtcgcgcacccgctttggatgcgatcggaagccgttcactgtttcatagagtgagacactacaacgaaaggcaaatgtcgccaaagcaaggaccccggaggccagcccgatcgcttcagccatattggaatgaaggacgtagagaagttttcaggggttttcaaagcttaggtggcacacttatacttatatatagaaatgagcacaatgtagcgtcaagttgtaggcgccaggtttatcttgcaatcgttgctctgaggtgagggggcggggcagcggctactcgaacagtgaggcgggcgaagcagaattacgtaatagtgactaggtgccttccatgactagttacacgttaactagttactcggttgtccaaaattagattatggattcggcccatgcagctccgtaacctgtttccacaagacctccatgacacgtcaccaagtatgccacggtgtctcggggtttcattggatttaaaggactcgctctgtgactcggactgccggctgtccttcctagacaggcgttaaatgctgtgaagctagtcctcatgtaaatataaagaaataaggcacggccagctctcagtctggcgatgtgggtccagggtcggaaagcttgcctcagccaaaagatttaggcccgttgacttcgggccaagtacccatagtaatccacataacacacaactttattcccagatcaagataatcgaagtttatcaagaaactcaataagatcgattgtgaacagcctcttttctgtgattcggtcgatgtgagacgtgggaaaatacaggatatagttagggttacctcccattaaacttgtacagtggctactttccgcctgctgcactcaggagggattcgcctttcatatatattcctgagactctgtcacagcttagtcatagttagctagttagcacccccaacaaggggttcataatatcatcatcttccccaccaagcttacttgccacatttatggtagcacgtcctggtttcatccagagttttttttcttccgagaggatctctctcgggtttgttttaacaagttcgaccacctcaggggttcccctatatgccaaggtcagaggtcaccaagcctggcacgatcggcggtcgcccacgctgtcgatcacagtgccaagccgctacggtaaggctgtcgatcacagtgccgagccgctactataacaatccatggacaagcgtactcgtcgggccacccagcttgcaatccagttcgacaattatcgccaggaggcacgcccctggtcaggtgatttcgacgcagatatactttcccgcgttatcatcatcctgaccccttcacctaccgggcccgccaatccctcaacctcgccatccacttccatcatccttccatctttagaggatccatttccaccttcctagcctatcgacaggtctatactcaataaggccgttaaggatttcctctatctaacgtcttacctcgccgttctaagtcctataacccctctatcaagtgagcctgcgtatccgctcgggagaccccgacctaagcgaactataagtaagcctcctagttcaccggcttctataccttaatcttcgacatctgtatcagactaaccgactgcctaacctactgctataatatacctttctataccctagtctttaacgcctatttcagactaaccgactgcctaagctactgctattatatactacgcgtataggcccgctactatatgatagcaacctcgttttagtccccggccaaacagttataatagtaagtttttccaaactgaggacgaaaattctgtaccataggctaaggacagccacatagaccttctataggataactaagtggaagtctagtcttcggaagactaataagccaaagtcgactaagtagaagtctagtctccggaagaccaataagccaaagtcgactaagcggaagtctaatctctagataactaataagtagaagacaactaagcggaagtctaatctctaggaaccgaataagctaaagacaaccaagcagacctccactcttataaggctagtattaagtacctaaccctagaacgacccccagtatagttaagagtacgattaactttacatttttacaatagtaaggctagccctatagtaggtctatcgagcctactataggaagctaaactctctaatctcctataaaaaatagtaaataacggaggtctaggtcctagctataataatagaaattagggtcccggctatataggcgatatattaactctagctacttccctactattacctagtttcgatatagtatagtttatagagcttatcgagaaagctatacagataagccttcggaataatactaatactctttataggccttaaggtaactaaggtccctagggcgagtaaggttccctaggctaattagttactaccgataccttatagaaagtatctaaaattggtgtttttaatcctttaaagagttttaaggatagaatagatatagtttaaaatctttatatctactccgatatatatacgtttatagattatataatagacctaatactcctaaagttagaagctattatctaagcgaatatctatagctacctataaggtaatgcgctccgatagtattcgtaggagttaactatagataaaaaacgccttataaactaggttctactctaagatagatggttttctataatatcgcagcgttttagacctaattataccgaggcccttctctagcttaataagtatatatataaataggataatgtatactaaggctgtaccctaagagaatatatatagggtatattatacctatataaagctataggtataatagatattcttaactagttattataaattcgctagaacctagagcctatactttattacaatatcctagagctaactaagactaccttattagttacttttataaatagccttaactactactattaagactagaaagatatagtaattaagtgctagagttagttaactactaggtttagaaataataggccacaataggataatttagccctatattactaataagactagcgctaaggctacccttagcgcctatatagctataaccgcttactagcctaagactattaaggtctaccttaaagctaggccagatatagataataataggctctagcgccctatagctaggcttagtagactccttagtacctatactaagctataggagcctaatattagtcctattagtattagccctagaacctagtataaagtaactaaggcctctaaaccttttagagataataatatttatagtagggagtttaagcttagtagacctagaataatcctagctactaatagtctagctgtaatagctctaggaactcctagtatactatttagaataaaccttagtagatatactatatagatatagatactaactattattagttaaataactacttctaagctaataacaatagcctaaaggaatattaggataatgtcctagttaataacgataattaataggatttcgaagacaacttttacactaataaggacctatatagtataaatttcgctaaccctactagcctataggataataactactaatctagtttttaagcctaggccaatctaccggtataggcctagttatatatagtcgatagtaagtactcagttacttatttatcctatttataggtttttaagttaaatactaagctgtattagtatcttaacggctgtaagccttaaactactaccgctatactagctaaagctatcgctaatttcgcaaatcctgcttattatattatctactcagctagatagaccgactatatccctagctatatatttcgatcctagtaatatataatagctatagttagacttagaagccctagtaagctaaatacttattaccttaactctagatatattataactttaatcgatttaaagctagcagtattactctaatacccctagtatcctattagcctaattcctataagtaggatcggttcctaatacctatctaaccgctatattattatttaagtttacttcctaaataaagatatagccgcagagctataaatcgaggcctatattatcgaagacctctatacctagcttcttattaatatagatattctaggactagaggggtttatactcaatttcctatattcctaaataattattaagtcctataaaaacctgacttttcctattaccctttatataaaactatactatataagtaaaagaccggtctatatttcttctaaaattgaggtccccctacgctaggcggcacagatccctattattataaagtcgattttactaaaggattataactttatttttaagctaggtaatagtaagtttaagattctagtatagatagttaacactggttttatatatatatatactgttaataataccgaccgaatataagtcattaggaagaaggattgtataggctaacttttagagctagactttatatctacctactaggtttctactaaggtaatacctctagtattatagccctaagcggttaagtcctaccccctattaattaattaagatatttataactctattactgtctacctagctactattaataacttaccccagctactagatagacttcctaatagacttcctaatactatttttatactagatatatagaaagtcctactaatatctatagcctatacttagctaagatatctactagaaatagtactacctaatagtattataatctataggatacctaaaatagctgtagtactctgcaatatttataagtaatataatatttagtctaaccctagcgttatagatatcctataagataaatagataagactcctaatagtccctagtttaaagctgtaatatttataagtctatagataggtaagagaaagctaataagttatcgataatatatttaatactctatatacttaaggaaagatattatttactaaatactaagcctaaggtataaaccctatttttattatatagaaataggttacttatatagataataagggtaacgctaagctctaataggttagttatattatagtcgataaccgcctaataaataaaaacttagttctagacctatacctattactacgataagacgagattattactttagtaaaaggtaagtattttattataattatagatatagtaaaattcttctattaatagtatatctatcccgactattatagctactaagctattatattataccgcggttaagaaattctctatattattactataggtaatttaaactctattgcctatatataatactagatagataatatattccgtatattttaagaatagtattaaacctatatcgataatatctttgtggttagtaatatacttaataagtatattactaaactctacctactatttataaaactagaggaatttaatattactctaaacctaaagaaagtatatattaggtttctaagtttaaccctattaggtaaggatattaactccacaggtatattaataaccgctaagaaggtaaaggtaataaccttactagtttttctatatatatataagtaactagaaatataccttaaaataataggtaatcttcgctattatattaaaagctatatatagaaatcggaactactctaagtctataagataaacttactaaaagagagcctaattaaaggcccctagcgctaagtatagagtatataagctattcttaataaaccctcctaggctaagcttaagagtttttatctactctaggctaagttttataaacctaaatagctagtatactataatcctatatactagctctatattaataccaatagtttaaaggaaatagggcacagtactataatctattatataaagataacatttacttataaggatgttttaaagctaccccctattatagagatctagccgattatattccttagccgacttcttatagatatagagaagaattattagcctactaagcttaaggtttctaccctctactagaccctctataaggtatatcacttagtagagacctatcctagcgaccttctagctatagtatatactaactatagtagtattataggtattactaaagtaataaacttaagttctatttctttagaatactaaaatcttcgcctagtctatatatcctagtttatttaatagttttacctatatatcttctatagactaggaaaaactaataagatcgctaacactctttcctatctactatatatagacctattagtccctagtatataagataatcttaaggatatcctagcactattcctataagtaggatcggttcctaatacctatctaaccgctatattattatttaagtttacttcctaaataaagatatagccgcagagctataaatcgaggcctatattatcgaagacctctatacctagcttcttattaatatagatattctaggactagaggggtttatactcaatttcctatattcctaaataattattaagtcctataaaaacctgacttttcctattaccctttatataaaactatactatataagtaaaagaccggtctatatttcttctaaaattgaggtccccctacgctaggcggcacagatccctattattataaagtcgattttactaaaggattataactttatttttaagctaggtaatagtaagtttaagattctagtatagatagttaacgctggttttgtatatatatatactgttaataataccgaccgaatataagttattaggaagaaggattgtataggccaacttttagagctagactttatatctacctactaagtttctactgaagtgatacctctggtatcgtagccctaagcggtcgagctctgcctcctattgattaatcgagatgtttataactctattactacctatctagctgctattaataacttatcctagttactagatagacttcctaatagacttcctaatactatttttatactggatatatagaaggtcctgctaatatctatagtctatacttagctgggatatctattagaaatagtactacctaatagtattataatctataggacgcctaaaatagctgtagtattccgcgatatttgtaagtaatataacatttggtctaaccccggcgttatagatatcctataagacgaatagataagactcctaatagtccctagtttaaagctatagtatttataagtctatagataggtaagagaaagctaataagttattaacgatatattcgatactctatatacttaaggaaagatatcgtttactaaatactaagcctagggtataaaccctatttttattatatagaaatgggtcacttatacagacgataagggtaacgctaagctctaataggtcggtcgcgctatagttaataaccgcccgataaataagaacttagttctagacctatacctattactacgataagacgagattattactttagtaaaaggtaagtattttattataattatagatatagtaaaattcttctattaatagtatatctatcccgactattatagctactaagctattatattataccgcggttaagaaattctctatattattactataggtaatttaaactctattgcctatatataatactagatagataatatattccgtatattttaagaatagtattaaacctatatcgataatatctttgtggttagtaatatacttaataagtatattactaaactctacctactatttataaaactagaggaatttaatattactctaaacctaaagaaagtatatattaggtttctaagtttaaccctattaggtaaggatattaactccacaggtatattaataaccgctaagaaggtaaaggtaataaccttactagtttttctatatatatataagtaactagaaatataccttaaaataataggtaatcttcgctattatattaaaagctatatatagaaatcggaactactctaagtctataagataaacttactaaaagggagcctaattaaaggcccctagcgctaagtatagagtatataagctattcttaataaaccctcctaggctaagcttaagagtttttatctactctaggctaagttttataaacctaaatagctagtatactataatcctatatactagctctatattaataccaatagtttaaaggaaatagggcacagtactataatctattatataaagataacatttacttataaggatgttttaaagctaccccctattatagagatttagccgattatattccttagccgacttcttatagatatagagaagaattactagcctactaagctcaaggtttctaccctctgctagaccctctgtaaggtatactacttagtagaggcctattttagcgaccttccggctatagtatataccgactatagtagtactataggtattactaaaacgataaacttaagttctatttctttagaatactaaaatctttacctagtctatatatcctagtttatctaatagtttcgcctatatatcttctatagactaggaaaaactaataagatcgctaacgctctttcctacctactatatatagacccgtcagttcctagtatataagataatctcgaggatatcctagcgctatatatatttaaataacctatagtagactaacctatagtatacctccttatagtatcggtactctagctaagcgacaatactaaggattgtatcttataaggataccagttagatactcactagttagccctaatcgatactctagaaagtattaacgcctagtaggatccctaagttaagaagttaccctactacctagagaatagcttgattattttcacaaattctaatagcgaggagagtctatatctaccccaatctataacttaggaaattttcaacttagtttataataagtagatatactagggtttcgacagagcttagtataagcttcgtggtatcatattctacaaaggtgctaagctcctaaagcagtacattaaacattgccctatctatttagagcataggatccgccgttatcgcccatacggttctctctaactaatcatcgccctaccgatacccttttatactatttgttagagggcggtaaaactaggcacaatgcttcgtcttatgctctcgaggggtcaaatgcttagtnnnnnnnnnnnnnnnnnnnatataatatagatagggtatcctaactagtaatagtattattaactagtcgtctattattaattaagagcgatcctatgattatatagaatagggcttaagccctattatctattatcttaaattgtttatagtcgattttatattcttatcttaattcttactagagagttagttaatagttatttagattaactattgctttaccctaggtaaaagtcttagcaaagataggataaataggtttatttagtattagaagggttattatttcttctaggttaacgtattcctatagtctatagctaatagcaattaatctgatatatatatactagactaactaattagattactaacttaagataattataggtttcgcttctgttatagtagcaaaatcggatagaagagagattagatgaaacaaagatcagatgaaaagtcgtcaatattggtcttaactctcagataaaagggttaggccgggcttataactgttggagggcggtaaaactaggcacaatgctttgtcttatactctcgaggggtcaaatgcttagtgtttaaatagataaacaactaggcggtcaaaaacatgagatcaaagtgtatatttaggtctaaaatagtcaatttgtctgatctggtattctatacaatctggggctttcttatacaaacattgcggatagctcggtaagtactgagatcagattgatcttataactaactagatgatttcatgatttttcgatcagatgaaatcatgactttcatcagatgaattcatgactttcatcagatgatttcatgactttgatcagatgaaatgaaataggataaatagtgcaaagtaagcaaacaatcgaatgaagaacacatattccaacactattactttagatctaatcgtcgcaatgcctatttcgactaatagatataacgcggctataactataactgataagtttactaagttaataggaatgatacctggctgcgtagactaggacggtaaagattaggcactgggtgctctctctttctggtagatagctaattaggggattcctacagtgattattagtgatcgcgaccctaagtttatatagggcctctagaaagcacttttcgaccttatctatactaagttgttttttactactgcctattacctataaactaatagtcagttagaacgtactaactagatagccgaagttactatatagtacgcaatcgctacttaccctaacgaagattagctaaacctattacctgccctctaagctatactaaatagctcagttagtataacaataggttacttaccttataaactcttatatagtatcgaactacactacccttagtcgcttttacactaagctatagctcctaatattattatatatatagataccgagtattctactacttaggctactatatatataaaacgctaatataaccgctattataggtagattttttttaatatcggtaataaagtctatcttaagctaggatatagatataatatactattaaactaagttttactaaggtaactacaatagcgttatatcaggtatttcgaagtactcgaatatattaggaaacttacttatcgtttaaatatcctaactaagttaagaatctacctagttattagtattatatacctagaacccgtcctagatagtaacaatccctaggagcgctaactagataataaatactacctaactatagataagcgtttccctaaagatattatctataaggtcgactatattcttactaagtatattattaatatacctagttaaccctattataatagtactaggtattaaatcactaagtatctaatctactagaaaggctaatcagctagggataactattaggtataggaagaggactgtattagatataataaggctattaaagactttaaggaacattagggcgtactcctagtaagctcctaagtactatattttccttactttatttttactttccttttacttttattactatctattcttactaccttatattacttaactcttacttctaactcctacttttattctaatttaagtttctaactcttatttaactcttacttactactcgatatacctattctatttttcctacctctattacttctttttttatattaaccattctctttcttatatactagacttattataccgaaaagaaaggcactcctataccttagtctattatagggagcgactgatatactttaccttctgggatatatattcaacaattcctatataatataatcttataataccgcttatactaaactagaactagataggctaatctagactagtaactaggtcccagttattataggtagtagactatctctataagatatcgcttagttacccttatatataagatacaagtataatctaaaaggaaggctagtactacctaataaccgtaacattctatctagaatatatattcaacaattcctatataatataatcttataataccgcttatactaaactagaactagataggctaatctagactagtaactaggtcccagttattataggtagtagactatctctataagatatcgcttagttacccttatatataagatataagtataatctaaaaggaaggctagtactacctaataaccgtaacattctactaagtaataagcttatttatatagtaataaaagaactgtcttagaagaagtatactaagttctatactatctaggatactaatagtaaactatatactagtagaatactatagaaccctagcctataaattaacttctatagactcttatatatactaatctagaaacgttactatatattcgttagcctttatatagccgcaaaatatagctacctaatagtcctaaaggtagatttaaagcttaaaatcgaaaacctagtttttacaattagacctattatcctaggttatcctttcgcagaggatatagttactaacctagtagcagtattctaagcctactatactaaagaataagccgaatttctatactcccgttctatggtatactaattatataactactacagtcagtatactatactctagaaagctgaaataaacttaaagatactagatatcggcttagataattaccactatatcgctatactcctataaggactaagaccctcctatagttttttctaggaattctctatatagtctcctttatacttagctaaagtactatcttttactttctcctaaatagacctaaaaaagataaagattatagacccagtttaatacttatactagaatataaattatctaacttagtctagtcatagtacttagtaagaatactagcccactatataggactaacctagcgacataattagcgttagctcttccgttccgttctctttaccggatattcctaaaccttaaagctaattaccagctatataaagccaactgtactaagctaatactaaggaaaagatcctccgcaatttcatccttccctataaaggtataatagagtatatagactaggtacagccagagatcgagaatttaaaaaggttacgcaaacatatagctagatattactagctacaactctaagaggccgctctaaccgagaaaaccaaggctgttactactagtacccttataataatctcgaacacacttagtagcttcccggatattcagtactaagctatcaggcgctaggaaaacctcttctactgcccctactaacttcaacaaagcgctactcctgacgaccaagcctaaccagagagcccgatactgctagacaataaagaacgtaaagcggctaccgagggtccaccgtacgaccccaggcgtgaattcacaccctcggacatctacactccgccccgggcctgcgataactgacggcgcttttcgttttctcatcattttttcttttttattcttattttttattgaaatttccttttttctcagccggaggccgagattttttgagacccggcatattgttacagcttagtcatagttagctagttagcacccctaacaaggggttcataatatcatcatcttccccaccaagcttacttgccacagactccgagagaaaaagcccttagaatgcgctttcaagtgactagttttgacaagaccgaagaaaccatgactaggatggcaggcggaactctattactcctaagacacccagataacgaccggtacataactcccgggggtggaatggaactggaataaatcgagagaaacataatcaaactcctaacactagaacaacatgttaggcatttccagcctactgacccttagggggaatcatagcaaagttctggtctccgtttccctcaaagtagtgtccatctgaaatcctttgcgagccattagcgtatacgttatattgtcgaccatttctgccatattgagaagcatcgcgaggtttgtcggctggtggttgcttggagtgatgtctctggttcatttccaggtctctattccaccgacgtagctctccacttacagccacaaacccaggatcttcaacaccgacaaacttcggcatatccatatggtttctatgtataccaatgaagatttgaccgggcaagatggccgaatattgtggcacgacctatttcttaggtgtcagcaatgaaaatggagcctgaatattttgtctagcttacaaaaccaacacctagcacgggtaactcttcgtaaaagcaagtgacctcaatcggtggtgtttctgctgtgctgtgtgccttgatcatcgtgtgaaagccatcttggatccgcgcaagaacctcagaatcgcgcttgaggacatccacaattttggaattcgtctgcttaaggaggccaatggaccgagacacgacctcagccaatttggcaaatgaagccccatggtgtggcgttccaaggaagatgataccacgggtacaatcgaggatgttgtggagatgtggttccggtcgttgcctcgactgaaacaaggcctaccatttgcattagtatcatttcgtcagtgtcttccactcatgtaatgcgatatcgtacatctttgcagactagtccacccaagctatggcagacaaaaatgacaggtcgttcattctatttgtatcaacaatcagcagtactagtggatcctagaattggttgtcttaccgtgtcgctgctatctcgatacgatgaaagagatgtcagcagattcagggcatgattgcagatgaagttctctgagactgggcctcgccaatcgaccaaaaacgcgtcataaccgaatgtgaggacacgagctgttgggagtatggatggcaagagactttcgggccagggtgtagttgcaccttcggcagtccatgtagcttcacgatcaccagtcaagccatgaataaacacgatgctatgagaacattagaaaggtttccacaacgaataaggcacgcactcaattgtcccatcatctgggttacagagcgttttgattccgttggggaaggacttcttcggctgaatctcaggagtagaattaggagctgaacccggttgtcgtcgcccaaaaattcgcttggccctagtatagttgaaaaatgtcatcttagatcgttatagaaaggattcctggtcgtgcggtttgcgatataagactgaaaggatggcggtgcatcggcgagattgcattatagggccaattttcattccaacctaatggcatctgctagtgtattgcggtcaatctaagcgccaggaatatctattttcgcctgaaactcacgacgtgggtcctttcttatctcgtcacatcgtgaagacatggtgtgcttatatttgctctcaattactgctggggagatggagacaggctgtaagaaatcagaaagccaccgcagctcgtcgatcctctcccccaggacaaacgtaatactatcaaagatgtactcctgtctgcccagaatgttggatcaggctacagaagcacggagcgggttagaatgagccacagcttagtggctttcaaatccgatttggcgccgctagtgatgaaacgcatttgatgccatcattgcccagcggttacaggatagcgttgaatggttctgctcaggcgcatgttttgcaggtatttgatccaactttagattcaaatccggctgagaaaaatggagtttctttacatgattggattcgcttattatcccccaacgtgctaggcagggtaaatcagagattgtgtcgcactgggggctggatacgatttctataattagcaacatgcatggctgggggtttggagtgtactcgcgctacgacctgcatcaaagaaaatctaatctgctttgtcgatccgatttgtcaatccattcagaattgttccaccctcgtacttgtcttcatatccgatccatcaactgtgatccaggcccagattcgttgtcacattagccgcccagaaaaggggctgtgccgacgtatcagaattgaaaaaaagcattcataatatggtgccaagtgccagccagtcaaccatatggaagtgtctatcaaaataccttcatgattggcgttataaggaagctagcactgtacgtacgcgccggggtcgacggattaggttattgtgttgcgtcgtcgtcatttcccgcaggtgggggccgcacggaccatgattctgccactgcacaccgtggacccagggaatcataaattcagcgcggtgaccactgttttaatcctagacaaagaaatctacactctctggcgggttgggtgaatgctcttctcaataacagaccgccagctctacgcccagcgctttgccttgcctttgacgaagaatcacaatcagtgaagcaaaaggattcggcgcatcagcaatgtaagaattaaatacttctgattctttaaacttccataataaccattcacctagtatcttggtcagaatgtcagatattgagatcattcgccaaattactgacctcattggggtcacagaaagtataatggtggcattcggctctatcaaagacctctctagcttaccggaggcctttcaggaagccatgagatggcttcctcttgttgaaaacaccttgcgacatgccaaacgcgcggcggagaaattgaactctaccgaagatgcccgggcactgaagaccgtcctgcatgattgcgacaagaaagccgataatatactggagatttttgagcaacttggtgaaaagtcaaacggagaatacaactcgtccgtgtaccgctgtatagttatcaagcagggaaaacagcgtgtggagactttgatggacggcattctggaggacctaggaaccttggttactcacaaggcgtttctaggagaaatgcacaatcaaatcaaccttttggcgaaggctcgcgaatatctggcgggaatttgtccctcgctggccgattcggatcttgccgatcagcccagggctgccaaccaatacggcgagaacagtcgccagtacaacttgttcggtgaaggcacacagagaattgctgatggccactatttcgaggcgaaggggaatcaaaattttggtatatttccttccaaggagtctgtggagaccagatagcggttatactgggcggcggtgtcggtgtttcttgaggtgtgagatatcctacaatataatgttcgcccggttaatgaacaatattaaacttatgttccttaagtacggaggcctatggccgccatgggtgacttgtttactattggtcaatattacctggcaggaatatagtcatacactcaacttgcttcttctttctctccatcttagttattttgaatagaatgcactctgcttcctttgcaagatctggcacgtcaaaataacaacttttttttatatacttacgtttttatcccggacgacttcacttttacacgcagagcgtcgcgaaattacaaccgagatttgactggacctcataattatcccgaagacagcaattagtaagtaagtatttacccaggtatccaatttgctctggaaaaacattggcacattcaagatagctgagaatagtaaaatccttaaatgcatcaagatagatattaaaaacaaaggaaacacgttcaaaccccctccccgtcaggcacgaaatcgagttagatcattcttccttcaattgtctggattgagctctcgtacaatgatctgggcccgttcgaggatgtccttcgtcctctcgaatcgggattcgagcgcatttgctacggcgggcgccttttctgcctctgaaagttggccttcatccgcaatgacagcgttgaaatccctcgccatactctctacctcctcagtcacttttgtctgcagatcatcgaaacaagcgtcaagagctcctatgtattctctgcctgcgagtctagagatattggcaaagagcatcgaatgcgtcaagtggtcattcataattttcttccggcgcttctcgcttccagtccctatgtagatcaataaactggttgagcttggaaataaaaattactgagttgacaaacctccttcttgattgatcctggcatatgcaggctgcatcagacctgaaatatacgagctggcatggccataaatagtgtctcgctttatgtttctagaattgtagttagaattttggctgggtatagccatattgggacatacatactctgcacattgtatgaccttgagcaaagtattcgaaatatgatgtccgatgcactgttgtctgaacttcatgctttgttgaaggttggcaagggcgcatggtgcaagctgaatatgggctgcagaatttagttacatgagcatgctggtgcaacacggagatctggggaaatacagtctttatcccacataggaatgacatacctccaaattgcaggcaccatttatcgaaaatagtgtcagtatatctcgcaaggcttccttcctggaggtgcagcgaagtctgaatattctcccatttgagagttagctgctcccgtgaaggctggagtaagtcgtcattccaacatcgaccattaggtacagctccggtcgtatggtctccgtaatgactacaaaaggctgaataagtgctatgggaccactgggaataaattaggataagttgtgtagtgagaaaatcttggacaaaaactcactcctgcccattctagactgatctgaatactttcagccgtccagcgactttgatattgccctgcgcatttcttagaaccgtaaattaagttactgtatgaatcaactcacgaattatgttggtgatgcattcgtcataaagaccaatcaagctgcggcgcgtaatttgagccagtccctggtcggaaatgagttcctatcgaccatcagaaattccacacatgctaagagcattctcagagacccaatatgcccttttggatcaaaaatacccgatgaaaactattctgtgcattttccagaacccgtcgaaggagggcagcgtttccacctgtgactggatctactccagacaatgcccattggcgcagagaggaaagcaaagctggcacttcgtgattcaaaaatgcggatgttgaccgcattagagctgcagcgggcactaattggcagtagcgacgcagctcccggattcctgcgagatcaacgtatgcctcctcatcactctttccgctaaagcggtattcggagtagagtatgttactgacacaaaacacttcgacatcttggtgcctctggatgagctcatgtgatattagagagtttcgccgattgatgaggaattgactcatgctgcccaatgagttagtatgcagatactgacgcgaatgtcagatgtcagatgtatgttacttacttgaacttcagcactttttcctggcccctactacacattcagcgagtgaggttgtttcatcttgaggcagtgaccttaccgaagctccattgctttgaccgccagttccgatcgtctcgcaggagaggctttccgtgccttggactcggttgattcaagctttttccggaggacctgcatttccttattcatctctttcactcgatgagcatatggagtatctccgcgagaagactcctcaggtgaaatatcctaaaaatacaggtcagtgagcacctcccgctccgacgggccgctgtcattacctctgactttgtgcagatgatcctccgcggctgatcatctctacatcttcgcataatgtcttgaaccgacgcgtttgtacaagcacgggaaatatccataacaacaaagacctcgtcacagctatgagaaagatagcgctctgtggctcgaaccctggcaaaattcagatcgctgaaacctggtagaaattagtctgcgacccaattccattggaaatgacaaaatgagattcagtacataccaggtagatcagctagcaccaagccgtttctcaaaataggtgatttgagatataccctgcaggagtattagtaaaacaacctggttctcgggaagtcccacgaaccttatcaacttgatgaatggccaaattgcaggattaccattaccagcattactggccgttagcatatcaagaatgtccctgcactcctcaatatcaccggcaactacagaatactcaagtgcatccagtccgccaggtcgcagtgctaagctggcagaggcccatcgttccaactgtgaaagaagaactaaataggcatcttcgaagtcttgagaaagatgctccatagttaatcctggttgcttgttgaacaaggactgaaaagttccccaggctctcccggcctgatctcgacatttttgctgctcttcttgtgacttcagttcttggaagaatcgagtgacatggaattgacggaagatcgtaagaagctctcctaatagccctttcatttcttctgaagtcatgaaatctgcttcgatcgtaaaaggtccggtgtggttttcatcaacatgtcggaattcagtcacaacacaggtgcaagctgtgccttcgcggctctatacatgcattttagtaaaacctcgttaattagcgaagatgccaatgattaagacagaacatactgagcgtgacaagctctcttgatcaagtaaagagtttatcagtgagcttttcccttttcgagtgttaggactagaagtgacagaagacaaaagataacgacgaaaacccataccaacaccagagtcgccgatgaaacccacggtccgagtttccggatattcaaacatgctcattttcttagtccgcttgtacaggacatgtagatcggaagaatgatcttggtttagctcggagagtcccatgatatcagcgagcgcagccaattcacacttaacttctttcagaccatcctggacccgacgagaataaattggggcagtaggaagtggctcttcgcgaacaccagcagacttggcctcggtcatttcttcaacgtcactacagtgatcactgtctgattcttcatcatcttgtacccgatcgctttcggtgggtggagcggcctggccagtactcgaggtagggaaagccccagggatccgtggggttgctcgggttgaacttgaagatatcgaggaagtcttctcgtgctgttgactgccattaattgtacgtacaagctcaggccttggactcggacttggagaagcattatgctgctgtgcataattggaatgcgagctacccggccttagccaagcatttgatgaccaagttggaggggaatgcatgggggctagggaatcgttgagacccaagttcccaaagataggaaccaatctcggagtttgtggagttaatgcaggaccccccgagcgattggtgtctcgagatgatgaaggggtgaaagctacttcagattgcgaatgaactgagaaggtgaactctgaagatggcacttccgtcatggtgtgtctgcgttttgacagttatcgaaaagcctgggtcaggggcggatggggtatatataaggagatcaatatggcctggtatggtaatcaatcccgaacctataacaaatccgctgtgggcctttgtatcgcgccttcatgctcctacttgcgctatattagcgctgcgtttcaaccacctttttagcgcctgcaagccactatggctgctcgtctagaattttgatgattctattctgactccagagaactatggctttgtccacagcttcgtgcatggtacgtgttatccacaaccttttgcgtgatacgttttatcttgaatgttgaatgagcagagaactgttgcaacttctagccccgaacgtccttttggcccccattagttagcgggcttagctgcattccaacccctgtaccaaaaaacgcacggagtcatgcgcaggaggcgagcatccaattagatttggagtccagaaaatttcgtccttttgttatcaagggcgttgcaaccctttcgaaaagcggcaaccacggagcactagcacactcacccatttctcacccgggcgacgcccaccggactatgaccgcatataagccacacgccggtgagttagtagctgagtgggtgaccaccagcgaaccagcgaatcctcaatattgtatattttttgacttctatttttattgttcggatcttaggaaaagatctcgtgccgccgactcttcacccccttcagcctattcacctgaatgctctgaacaccactattcaagacctggatatcctacacgctgggatgttgatgtttacaatgttcgccaaagtggccagctatacaaacaggctgtctgtattacactaatagctcagggggagctaaagatgatgtattaatactaactccggcagtgccttggggccgctgccatagagctgcatgataaggatgactcaaggtcatcaagtagtacggagatactataagaaaaaaaaaaaaacagtatgtgaagtctcaaagtgggagatttcttcagttctttgatctggatttatcttacggtcttagtacccctctcctaaaattttgagaaactctactagagcttaacaggcactaatcattatatggagacacagtgagttggtgacataccaccaaattcgattttaccgttgccattgttgtcgaatgcctggatatgctccgcagcctcctcgtcattcatttcaatgccttgctgcctagaagtgtcgataagctcgtctgtggtaatgaagacttaaacttgagcaccttggcaaaaggctatcagtgagagacgcacggtcattattgacatactagagtgcagaaagtaagcatcggcgcgcataatatctattgggaaggcctgtaagcagaataggcaaagaagaggatgctttctgttctattccgctggaactcccccccttaggcatgtaattgatagatataatcgcaaattcttcgagctccgacaaatatatattgatcagatctcacatacaatcaaatatttacattcatacaatatcatttggggggatgcgaaggcagctaatctactcgttgatgccaatgaagatatatacctgattgattttgggaggttatactgaaggttgggttgagaaggagaagtctaagtcgaccaagggagatctctagggacctgaaaatatcaggcggtacctttttagatgaatattacataactactatcgttccgtgctcatactatctactgttagttattacactttcttatccaggctaaggcagcctgctaagacgacttcctttactttatttatacattgatctgtgattagtttgcaatgcttgatgctctataaattcactatgtttgtatcttgattctgtatacgttgcctacttaatgccagaggcataatcctggtcagcctgaggtaatccgatcatatcgccctacgaaggtgtaaccgctatttttcatcgatcttaggcgttaaggccctccaaacatacgagtctccagcatttgaagccactcacactcgccacagtcctgtactttcccggagaaaagctgaccaaggcccaaaacgtttgaaaagccaagcctggatttcaacataaagcccccattcctaccgactgtatgaacttcaaacaaactctccgtatcctctggctccagcgtggggagatgggaatagtgacagcctcatctcttcaatgcgtacttgcgaaagatagcattgagcggtgtcgaaggcggtctaaaactagtaagagctagtcctaattaggctgtaaagccattaaaatcaggcaccggactgttgtcggagaacgcagggtcggcataccagagaataccggaggatctattaatcctaaaaatgtatcattttcccggacgtttgttatttttagagagttagagaatttattgacatttttctgccacatatacaattgccttaccactcgaatttccatcagatgcttatacttaaaattccagtaccgcctgtctagatcgggtactactcagaattctaccacatttctactatactttattctatataaaaagacatatattttaattagaaaaaaatcatatctaacttgattcctagaacagtagagtaaagtaggtactcaaccaagttttagaggtagtgctggaatttcaaggataagcatccgataaaggcaacaatttcctgaatttaaattcatatttatagattagatgatctctgaatagctttatacttcggtatacagtacaatgattgataattctatattatacttcgtatggttgtcaaattaaattaaaagggaaaactaaggcggtggtaaaagcggtaacccgattaggctggttgtcgtgatggtcccaaaaagccctcgtacccttccttttcctcaacattgaacttcattttccccacttgtcactgcacgcagcaccagcgccactggcaccactgctcgtactgtttcctaatggcggctaccgaaaagtctggtatcagccttatgagccaatacaatattgttctaccgaaaaggcaggcgtatgactcttccggcaaacctatacctacatgcgatccagatcaatgtgctgcggcaataaagggggaggatctccccgtcgatctaagctcgttttggcatcaaagagcagttatccgtgggattcgtgattcacttcaatttgcaacaagcccggcaattcttgagctatgctccggtgacgatggtcaggcccatcaattttctcgtgcccgtaatgctcgcctgataatgagtgatgtaatccccgatatgcaaaatcctgccactcagccgtactgtatctggtatcccgaccttgcatcagaagaaacatatcgcgaagttgcccgtcggtatccgtctatgcggtatcaagtgggccgagcgtgtgctgcagcatgctatatagatctctacaaagaattggactttttgcctgacgtttctattgcggaagaatcccgcgaagttgataaagacgccgaaatctataagattattatatccgccccccaacgatatgctgttatggaagatttctctcgatccgttcatcttgaaaccccacgaacgtctgcgtctctgaatggcgatatgaagccccgatgggctttaggacagcgagttctccctggtaaaaatttaccagagacgactgctgatgatattgacatcgaggaagatggatttatcggctttcaagctatcagcttgaaggatatcagcggaatggaggtcttcgctgaactgggcccaggccagtccgatcaactgtggatgcctcttccgcctgatctcccaaatcttgaaaagcgccttcagacacagatggccgcgtgggagggcaatgtggatcgatacagtcgactaatgcacccacgtaggctgagaaccaaacttgaatataattgtattcttcgtggcatttatcacagtacaaccttcgccagatggtgggcctatcagctagaaacaaaccctggacgggctatcctcccaggtaaattgctcagccaaggcaatgaacgggagtgcagagagatacgcaccgcgattaatgcccgcgtgataatgaacaatgatatctctggtatcgacgatgactcggactgtctcccgtgggtcatatgggggcccgtaaagccctctgagaacactttagctgatctggttcgaaagtgtccgtccatgggacatcaagttgcgatcacttgtataatgtgtgattacggttcgatattccgaagtttgaagcccccctataccagatccttgtatgtggctgctaggcgaagtgaaaatccattctacctacaataccttgaggaaatcataaaggagcgcgacataactcccccggactttcattacttcaaggactttgatcacactgcaccaggcttacagactgatctggagcctagagatgatctcactagtcccactatcagctaccatgatatggagatcgggtatgggcaatatccctgtggaaatgaacacgaagaaacccgaggtacatatggaggcgggctagcaaatccgggaacggtggagagatacatgtggctctcaactgaaactgcacagaagttgaaagatgaacttgacgtgccctacccaggtgcggatattggtcatttgtatgacgatgaagaacttcgatccaagctttcacgccgtatacagcctatggatcggtagtatgcaggttttgatatgtcgaatacagtcagtccctttgattttcgagtattatctgccgagtattcgctagcttagttaccgatggcaatatcgctcgtagatactaggaccaacctttataatctcagatcagttccaatccctcttccacgtataatatagcgcgtcgagcacttgtggtataatagcagttctgtaaatacactctagcagcactggcacattgtgacaattcttatgcaggtaaataaaagctctctaagaaacttgcaggtttctcgaacttgaatgaattaccagtactgcgccgagcctgacgaagcaacgggggtgtgaatactcatgaaacaccactgtacgtgttccagggtcaaccgataacccaatcatatcacggtcctcgttacctgagcgggtcagtgcggccgtcgcgcgacctagggtaaatctcaccctgatctcacgcagcttctcaccctgtttatagtgcactcactctgtttatagtgcactcaccctgctcacccccggtcgagcgaccgtaaagcggcgctcacccatttatcacctgggcgacacccacccgaatatcgactgcgaataagccacacgccggtgagttagtagttgggtgggtgaccaccagcgaatcctcactgttgtatgtttatgtttttgtgttgttcattggcctgaacgtcgagttgcctagtatatgtgagattgagcagccgagaaatggttttctgtctactattccacggttagattttgatgttgagaggtccacattagcgggatagttccgcacgacgttatcaatcaaagggctggacacctacctgatggacactactacacctgaacaactcaacactccgaagttacctacatcgaaatttgcacccaattgctcaattgtattgaagtcccatcggccatgacagcccaaaccccaatccacgagcccgcaactgctgacggctggcatggcgtcatcccgagcgaggaattccccgccgagaaaggccgctaccacctctatatcggcctcttttgtcccttcgcccatcgtgtaaatttcgtccgccatctgaaaggcttgaccgaattcattgacatcagcattgtcaagccataccccaagggtgacgccaaaggctggccaggatggcgattcccggcctctgatgatgagtatcccggtgcgacagttgatcacctctttggtgaagactatttgcacaaagtctatttccgagccgaccccgattacaaggggcggtattcggtgccgttgctgtgggatacgaagactggaacggcggtttgcaatgtataacacctaatggatcttggcgagtaaacgttttactgaccggatatatcgtggttaggaaagtgcggaacttcttcgatggcttcccacggctttcaatgaactgcttccagcatcgctcgctgcaattgacctttacccggtacatctgcgcgataaaattgatgcagtcaccacgtggatgcaatctgatgtcaatgctggagtatataaagcaggctttgcgtcctcgcaggaagagtatgacagaaacgtcattcctgtgtttggggctctgaacaaactcgagaagattgttgcaaataatggaggcccgtttgtgctcggtcgagatttaactgagctggatatccggttgtatgcaacattgatccgttttgacacggtatatgtgcaacatttcaagtgcaacctaggcaccatccgacatgattatccagttttaaacaactggctcaagggcatgtattggaatgttaaagcggccagagactcgacaaactttctacatatcaaggagaatgtatgttgacatgcttttttggtactaattgacaccaactgacttgatacagtatacaaagagtcatgcggatatcaatccaaaggcaatcacgcctatgggtcctttccctaacgtcgaggaggggttcgaagaggactggagcaagttggctgtcggcgaggtcaagcacccctctgtgttagactatgaaactacaattcctgatctgtagtgattaatattggctgtcaagatgtttgatattaagttatctacgtcatgtctggttgtgcctcttgaatgcttttttctagatgtcagtgtttgagatagaacctaggagcacaaaatacatctaatgatactggagaattgggtcatggatggcatactttcgcctcatagacagaggatatcgagtgctaaatgaatgtatatgcatcctagcaagcccagctgggcagcgaaattatcctaaaaatcaatgtcctttgcaactgctcaatccatcgttctgcacacgttccctagtcctccctgtttttttcttcttcggctgtcgggtagcctcctcctaaccatcttcggaagaattcacctcttcaatgatccccgattcaacagcctgtgtccaggtgtggacattcttgtttcccttactagtgaaaattgaaaatgcaccattcggtccttcacggatatccccagagggaccgagtatctgcttaagcgactccgtgctaaacatccgatggatgttccgggtcttttccttctgcagaccgatcatccacgagtcaatggacccttttgccacaatttggacgtattccactaagcgaggttgtccgatgcggtacagacgacagtacgcctagcaacttattgttagcttgcctatagccttgaacccttctaggatctgaattcagacttccttacctggtcttgaatcgcttcattccaccagggatccacaaggatgcacttgttagccatagtcaaattgaggccaacaccgccagtcttcagggaggaaatcatgattttgatatctttctccttgctgaattgctcaatttgcctatcacgcgaggttggcgacaccttccctgtaatctatatgggcattgttagttatgtggctcggtgtttttctcttaccagtcttgacgtacggttgcatatttccagccctcctcctcacacatgaactgaagaagttgaatggtcttcaggaattgagcgaagatgacgatcttggcatttccatcctcttgcacccagtctgtgatgagtttccgaaccgctgtggttttcgctgacggcatacgatccccaatgcacgaaatccaatcgctctcatcctcactgggctcgtcccactcgcgatctgatggatttttcaatagaacctgttgtttgaaagacttttgacgccgctttttgaagatgttcctgccatttcccttccgcacggactgctttctcttctttggtgagccctttggtgaatcgtcggagtatccggcctccttgatgggttttttgcaggagctgcagatgcgggtggcggtatcggtatttccactttggtcgggtagtgcatcaaagcaccccttgcaataaaggtgatgacaggatgtgaccacgaatgcctccttctcgttcacgctattcgtgcaatgagggcatattctgcatatgacttggtagtgttttccctcgttttcgcgcacgcgctccacgtgttcgtaaaattttacctggaggtcggaaaagtctcctggaggccttggtcgaggagcgaccttgtcacccataccgagaattaagttgatgatgacccctgatgcgctcttaaccacgccttctgcttgtaccatctttttgagttttgcaatgacattttggttgagcacagtctcgaggaatttttgggcgaggagcggatggctcacaaacattctcagcattgttataacggccaagatgcatttgctctgtttctgtcttgtatcggcagacccttgtgagatgtgttagcgctcagcttcttttgctatcaatgtcagacctaccattgaccattgcaatgccaagatcctgaatctccctgtaaagaaacttttcagctgggcaaagttcgacctctacgacacggttattgatgcccggaagcgtgataatgggcttgccaagtatccaggtactgtatgtgctgcggtgtaggacagtttcaaggatgttatccaacccctatagagaatgttaatcttggattttgaagtaaaggcttcctcaaggagactaaccttggagtattttttcaggaaggtgtcatatcccattctttccgatgtaaagataaaatggagatatgggtaaagttcttccaccccgctagaaacatttagtcagtactcaggacttcggtcattccaaagcttgccatgcccaagtggtgactagttcttacttgtgtaacggcgtcccgctcatagcccatttgaatttgcctttcaaggctcggacagcgatggaggttgcggaatctttgttcttgatcaaatgagcttctgcgaagtcgaattagtatcaaccgcattgaatatatttataagtcctgtacataccgtcaagaatgatgcggtaccactcaaccttatggaaaggtccagctctacgatagtattccttttctctccaagcctcaagcttttctggagacttgatcatgactggtggtttcaacttcgggtgagagctgcagacttgctcatatgtggtgatcctataaggtcagggacatgaaacatacagtaatctgcttcaaatttcttacacaataagccgtttttgcatcgctctcacaacatcgctctcgctcgttcgggcaccggcgtaatactcgagaacatctctacttaccctttcctcgcaatgcgtagagatttgatcgatcctacaaccgagttaagtaacactcacattaatcttttaagtcgaagagtgagacataccactgtgcaatcaagcttctcgggacaatgatcagagttggggcttttgaacgatttgagaacttttcgttcgcgatatttgcttatggaaaatataagattttgacttctcaaggtggtcttcgttcttaccgagagctgtaagcgttttccccaggcccatctcgtcgcagagcaagcctccatttggctccaccgccgaactctcgcgattgcgctatgcacgtcagctaggtaccatgcttataacgtagaatgccaaacttaccatccacgcagcggccttgagctgtttcaatagttagtcacatatatcacaatttgaacctagtagatcaagatttcaaacctgatggtgcttcagcagtgttttgagacctctaaccttccagttcatgttgatgattgacgccgagggctcgaatttcctcgagtcctgaatcaatgaatttgcgtcttttttagcttgcggttggtcttcaattgaaagcttcgcaacttcctctgcgagcgctgtcgtcttgttcttttgctgggacacaggggtcaattgctgtatattagcgttggcctttgcgccgctgagtatgttactatgcatcagacccttgactttctcgatgaaactcgatgaggttgagattcgttcctgctcttttcccttgggtttgcttgagatctcttttttcactggcctggaagaacattcaagatcactatcatttctggaagattcagcgggctcgggctcggaatccaccagtgactcctcgtctgaggctaatttgaactcctcatcagaacagttttcctcgtcaccagaagactcctcatcattggagacttggttcgagcctgttttatccagcgattcctcatcaggttccttagggaaattctctggcacaggatcatcttgtttcaaggcttttttcgggcagaagtaagtggtgattagtttctgatttggcggttcaccttggatatgggcttccacgtttgtcaacttgctcggcctatttgtatgatcctctagctcggacttcacctccatgccattgacaggacttggagtgtcctttaggacctcctccattgtgttcgtagtatttttagtatttttagtgggtttctctattttgacagcactttgcatgttgaaattgatggatggaccatgggtggtgctgaggaggtggagtgaacaaagttggatagagaagtttagggtgtgcgaatcagaaataggagacgaggagaaataattcggtgagctagctcagagaagaagcaagaatttgaatgtaacaacacagagcatagaaatgaccccgaagttaaacggaggcgatgagacgagttgcttcgcgggttgaaacatagaatgcgtggagataacagaattggataatcaaggaatagatatgtgaagggttgattgtaacgaatagggtgaaggatttagaggtacggactggccatataatagagagatattgatggccgagatggaatagatgtgaatagaacgaggataaagccaagttgagggtgcctaagtgcaagaaggagaatgagagatacctcaaaggcaaaaaatacataattgccatgcagaaaaacttttgattgtcaccttacatccctaaggtcagtgagaaatagagagggtgtataaatgtgttggagggagtgagaatcaacaagcaaaaatatctatacctcccgctaatcccgggaattgcctattcagtaagcgtgaatagcctcaggtttgcaactcgttattgctattgaacctgtctaggtgacaggcactttcgcctacataagatcaggctttcacgttaagatcggagggtatagcatatttatttaacaaataaatcaatttttgcttcctatttactgtcatagggtcaccaccaccagctacttcaaagaatgacgtatcttgtgcctttgatattgttgatcaacatgtcttttataatctctctcattcacctcgttgactggaattctatcaatatctccgttatcttaaagatattgaaaaatatgtctcaaaatatatatcgttcatccttatccgatgttacccatagcagaatacaactttagtatatattctgccggtataatggtaactctctaaagaatcgtctgtaagggacttgtacctatgacatagtgtcatatcaataagacaggaattaaactctgagtagatgtataggccagaaaaccttgttaaatttcgccaatcttacagactattcttagagccgtgtaggtatacgagaatatttacgcaaaatgcactttgtagttggaaaataacagcaaagattcatcgactatcaataaactgatcatacatgccgtgaatcgtgaaagcatatccgaaaaaaggacataaacctgaagattgcagattgtgccaaatgaagtgtagatttgcacaacatagagtcgagatgatgagaccacaacagtgtcagaacgcgaaaaatcttcgaaggcctttgtatccaggctactggtcctggtcctactcaagctcttgctctggctctgagtggccttcctcctcgcttttttcaggagtagtagtgcggctatcctcgtttggctcgggagtaatagagcgacgatactcgggttgctggaaatcaaggatgcgacgaacatccctggggaaatatgtaggtgcctgaacacgggtatcctcacgcagctggtaaaggttggagcgggccatagctcgtcctagttggtagcttcctctagtctgcacagcctctcgaacctgggcgttggtcagactctcctcatgcagttcactatcatcttcctcggggacctgtgcctcatcaacccagagggtccgcagcacctctcgaccatggcgcatggggcgctccgtaaacggggtgttgcggggagggacgaaatcagacatttcgcggttgagtgggagaccaaaggcatcgcgggggccggtggaagcttcattccaagcgaggttggacggagtgtcttgctcttcttcgtcagaggtttcgaggtcagactgagttagaaagatgttctctttatcctcttccatggagtagaacccttgctgcggagggctgggggtctgctggtcctgcggatcttcgtaaatggtaaagttgaggctcgagggacggtgagattcccagacgcgcgagttggggttagtcttgggtggagaaccgggtagctcccggggctgtaggggagccatcgaaccggaattaagttgatatttggggggtggaaaccactcagattcttcagtctcctcggttcctggattcagaaaaatgagttgcccgtctcatgatttgagaataaacaaaataacttaccaagccgagtcagacgagactcatggaccgcaggtgttgagtacagcgggtttccgtagacagaagctaagtaccaaggggaaggcgcgatgctttcctcagctggatggcgctcgcgcttcgccccggtagagatagacacagcaaaagggttttggtcaaagtggtcttccaccgagggtagcacgtagggaattgcagggttcgtctggatttcagcgagctaggtggtgaacgcggagagcgtcgagtgttagcttgctgggacacagagggataacgcgcgcaaacggggaaagcgccgggatatacttaccccatcatcgcccactttaatggtcacctccacgtccgcgggatccatcttgaaagactactccgccgttcaattagtataccatgcccttcgcgagcgatgtgatgagtctatccattggcaatgtctccaggcaaccaatctgtctgacttgtaaagcttttggggagagagcatacctttaggaaaggaaagaaatgtagcaatattcttgctccgaaggatcaagtattggtcctcgctggttggctcaagcgccttgcctgtttcaaaaagaatgtcagcatggaattaaacgaggctcaaaggcttgtcaacacaggggatatacttggctgcttgggttaaaacaagagcaacttgaggctgtaactgtagctgtcctcgatactcggtggcccaaccaaccctgcacagtgtggtgtacaaggtctcgtcggcactatgtcgggtgacaacaaggaagacaagggatcaaagacagaattggactgtatatctcagggaaggtcgctagctacgcttactcttcgtgtgcttagtcgtcgtacgcgtcgctcttggtcgctccaactctcaccatcttagcatttagggttttttatactatatggactctaacttcgcaggccacttcaagtttagaagtacttcattgatttctaatcatgaacgataattatattgtctgaagttcatgtgtggcctaaaatgatacatgctcatgttatacttcgtctatagatagttaggggcaaggcttatcacgtgggcatatatgacatcatagcatgcacgttgtgtaatcagacatataatattataatgagatcaataaagcaagaacaagtgaaattctcattgctgtagattgaaatatgctaattcacggtactggtgtaccaggcgcaagatcaatggtacgtgtatatatagtgaacattcacacaagtctaagcagatcacaagggagacccgcaaacacatcagatacaaacataatcaacaaagatactgaatcccaaggacactgtaggatatgtagtatatgcaatcagaaatggaacacactggaacgactttggcataaacgaattaacagtgtagagaaaaacgatacgtaaaataatcacaggatagaaatttctagggtgacttgagattgggtcgagacgtattacctatattttagcatgaacattttacaaggagcccggtttcaaaaaaagggatggatagattgaggttggtcagctacctatggaataaagcatggatctatcggcaactagcgaagaacagagacccaataaagtcatagtttaagaccgtccatccatcaccctattattgtcaacccccggttcggtcttcaggactcgactcatcagacccacagaatacacagcacggacgcattgccccttgagagatttcaagaacaccgggaaaaatatgaaggggcgaggaaaaaaaaggacccggtaatagatgcagcaaaccacatcagagaagccaaagccaacgcagcaaaggctcaaacgcggaggagtggggggcagttattggacacgggcatcattttgccgaaaggccatgagcaaatacattggggcggaaaaaataaaggaaatgggtatttcgttctctcgaggggaagtgcgacgttgccgtgggatctgtgtggatggaaaatgaaaagagaaaatcacgagcccctgtacatcggcttcaccaagctagcgtagatactcatgaaatggtcatgggcagtggtaaatggtgcgtaaatgtaatcgaggggatagaaatctttttccaatattctccgtttatctgaactggccggggccgaccatgccaccacggacgtcaccgccgtttgactggccaaacatctctagcaggtgtctagatgaaggaggagggccctgtgggccagggttaccaccgaagggaccaagtcccatcatggcctcggggtttggcggcatgggagggaagcctggaggagggccgttcatataacctggaggtggcatcatgcctggaggtaggccgcgcgggaagccttggcgctcattcattgggggcgcgttgccgggcataggaagcatgccaggggggaagttgggattcatgccgcggcctggagtggatattccaggaggagggcccataggactcgatacaccctgctgcgggacaggctggccagtccatccaaggggtggcagatgctcgagacccgggggtcgctgaagtggcatggggggctgattcgcgccttgaagaggtcgcgagccacctggggtcatggggccttgattgccctgagggaatgacatatcgtcaaagaatcccataggcggaccattcgcaggtcgccggcggaggtgctcgctatctggtcgctgcatgtttgcaattgctgggtcgtcgaggaaattcggtgtcttttgggcagaaagccctggcggggggcgtggcatgccttctggcatgagacctggaggaggggcaatacccgagttgggagactgctgggatagatgacccgcagatggtggaccgactcggacttgctgcatcagacgaagcaagtgggccctctccagcgcctggggatccttggagctaacttgggccatggggttctcggggccagcgcccatgtagtcggatcggtgagagggttccctaggagatgacagagatagggcggcatgttgctgttcgccctgcatcatggagatattccgttgctgctgaggtaaacccatctcgtgaggcgtagagttctccgagcgttgtccaccaagcatctgcagaatgcgctgaaagccttcttggtccgcactgtgggatgggaaaggcatactctcagacgcctgctggggctgttgataatgctgggcctggggaggggcactgaaataaggcatcggctcgggttctctggcagggctctctggcatggggctaaagagacctgcaaaacgagatgattttccaggctttccggcaaagagggagggttcctttttagcaactggatcggcagcgataggagtactggcttctggggtctgaggctgaaccttcgaatcgctcaggagtccgaagaatcgttccatcgattcgtcggacataaactgagcaccggaattactgaagatctcaccatcagtgcggcgggtctccggcttttgttcttcaacatgtgcttctctcttctcctcagcaggtgccggggtttgtgcggatgatccagatccagatccagccttcatacgctccttccaccgctcaaagtcctcctgggtgtgcgctcgtcgtggttcgtctcgttcattggcatccagccattcaggttcttgttcaaatttggcgccgcggttccactcacgctcggtgccgtgtcgggtctggttttggcgccattctcggttgcgcaacggcggtttatcgtcatccgcatcagcggcttcttgggcctgttcttcgcggaaccagcttccttcatatttggatcgtgggggctgtccttctttccgaatggggaatcggccatctttgtcacggggaacccgttcagcatttggatcgcggggcccttctttgttttcccatctgtcgaattcgccgtttcgtcgaggcttgcgctcttgctcatctgggccgaatgtgcgacgtgggcgcccggcattccagtcttctctctcaccacgccgggcagtcagtggccccggcttggcctcccgtcgatctaactctttctctggggcatcgcggtccttgaacaacctgtctctgaagttgaatcggtcgttcttcgtttcatccgaatcatttggccgtgccgctggtcggtccgtcagatcgaacgagcctttgccgccaatgcgagatgaggcgaaggcggttttggggggaccgagtacaatatcctctgaaaatagaagaaatccaattagcaaatgcctcagataggtcgggatacttgatgttcgacagaaagggagacaataataccagaattagatccccgagagatatgtttggcttcaaaaaagctaggtcttctgtttgtgccagtctctgccggactgttgacatcacgggcgccatgggttttgcgttgtgtggttgtttggtcaggttgaggcctacaggttgcggtcagtcttgaaggtgacagtgcgggacagctgaagaattgcaagcattggagctaccatacatccactcttccattggaggcagaccagcaggctttgcgacaaggggcgagccgcggagccatatcagctcatcgatctcgtaccgtcgcgccatggcggctcggtctgtggggttgtgtgtgcgtggtcttcttcacggtgatgatcggttcattggttgaatgagtaacaaacccagattgagtaaccaaggatgagacgcgaaggtatgaaatatttctagcaaaatacgttgaataggaagcaggcagcgttgggtggttatggaaaagaggttggatgaggagaagcacacaagccaccttgtggcgatggcggtgaccagagtctcgggagccaactctccacttgccagttggtcctttgatcttagaaatttatatatctttcactcttactccttactacgtatagtcttgatattgcaaacacgatagtgttatacagtagttagtgaaagcccagatagtcaccttattttcatgttcaaaatacatgtggcatagatctataagacaagcgaccctcataagcgtacatgtactctgtcgcctgaatacccttcactataatttctgtaactagtaaaagcattattcgggagtgttaaaaaaaaacaatattagctatagaacaaaatacgggtgtatatgtgaaaagcagcgactgtttcatgtataccaaagcgacaggctttatttagggttaggcgtgtgtcgctattcaaagtaaaagtttaaagtttaagtgtgagagctagatgatatttcatttatattgcattgatgatattatagatcgtggaagcttatattgataccagtatatatgtcagaattgggagttgaggtagcatgaaagccatatgaaaagacatctgaaaaagaatcagtacgatataggtctatatgtataggagactcgtattacaaaatactgcagaaaatccttggattgtactaaaagacatggaagattgcttgttgaaaacaaccagccgaacacaatagatctcagagctgttctaacatatcgaaagaaggaagatcatcttctgttggagaagataattccaagataacataatgattattccagccacaagctagatagaccatcgtaagagcacagcagcgattatgacgggcaatacgctaattagctcccccagacctgcaaactcgggcggaattctgacattcacaaaagccccagccgcaaggagcacggcaaatgtgttgtagacaaaactccaaacgaaattgaacttgatacgtctcatagagaccttgctggcatccatcatggtgagaaggccagacagatatggacgcataagcacgacatcggctgcagactgggcaacatcactgccttcgtttatgtgaacgccgatagttgcttgcgcgagtgccacggcgtcattggtgccatccccgcaaaagatgacaatcggctcctcaccacctgaaagactgcctaggagatctttgatgtagacctgcttgtccgctggagagctacgagcacgaatgttgctctcggggatagctaaatttgtcgccacgttttgcacggcgccttcgtcgtcgcccgataccacatgaaccgtcacgccgcgtctctgtagggtattgaccacatggggtgcatcagctcggagagagtcctcaagaccaaatacagcgagtagcacaccattgatggtgaagcagaaaacagtatagccttttgtaagcaccggttgcaccagggggtgcgtggaagtcttcagccagtgagaattcccagcttgtagcgtttgactaccaagtttagcttccacacctcggcctgtcaagcttttgacgtcagggacagctgttgcaacaatccccttgtgcctaatatgattaccaatagcaaccgataccgggtgcttgctgtcaccgatgaggcccaaaagaagtgacaggcatgattcctcgtctccgaggtaactctcaacgactacgctgagctttccctgagtcagcgttcctgtcttgtcaaggaccacatgagaggctctataggcgacttcgatagaatgcgccgacttgaatataacccctcgctctgctgcgataccgctgcagatgacaaccaccatcggtacggcaagcccaatggcacaaggacatgaaactataagcaccgtgatggcgtaggtgacagcctgcacggttgcttcggatctagtcttagcttgtattgatatgccaagagccacccaaataacaaatgtggcaatagtcaagcctacaataactggaacaaaatatgaagccaccttgtcggcaagtacttgaatctttggtttggaaagcttggcttcatcgaccatggcggcgatagtgttaatagcgttgtcgcctgggaggcgagttagcctgacaattagacttgccgatccgttgattgtccctgcaatgacacgcgacttgggtttcttttcgacatgccgcgactctccagtgagcattgactcgttcacttcagatgaccccgatacaacagtcccgtcggtcgggattctcatatcgggaaggaccttgaacctgtctccgtattgcagtagcctgacgtcgatttcacgagcatctattgaaggtgattcttccacaagaagggcagtttgggcctgaagcgatcgaatagatattgactcgaccgctttttgtcgggcaagtgtagcgacatatcgtccgaacatgatcaatgtaactagaagtgtgcttgtttcaaagaattggccagtggaaagaggtctactagcaacgagaaagccgaaagaaaccacagagaagatatatgccacgctggtgcttaacacaataagaaggtccatctcgatgactcgcgaaaagacaagagccttcaaggctttgggataaaaaggccctgctatgacaacctgaatgatagtagccaaagccagcgaggcggagctataggcgatttttctctcggagatgggggcccatgccatgattaagactgggatggtaagaactgcagataagagagtcatgaacccggaatggcggacatgcttgctaccagctgcaagtgttggatcaccagagatgggcgcaaggcttgctatatcaccccagtgcttttcaatgagatctcgtgctccaaccacttctggatcaaaagatacacgaatagtgcaatttccgacgagcgaaatgtcactcacaccttgcggccaagcctggttgacgatcaaacctggatccccagaaacaattatatccatagctgacccattactggcgattatctcacatttgaactctgtggtccgctccaagtgctttataacaagctccacagtagagatactgaggtccaagtcgaattcagctcgagatagaaccaaacttgtcctcaagttcccaacccctgacattgtcgcgagggttctgttgagtttcgtctcacagccagtgcaagtcataccagatatcgagaggaccacatgctcgacgcctatggcctgaccctcgagatcaggggcaattctaacagccccacccttctcgtcgttgggtaaggatggcttttcggaggtacagcaaatatcagcacaagagccatccgctggctttatctctgacttatctgattcggagatacaggggttggtgaagttgttgccgcaggtggtaattttgggtttgcagcaagaattggtggagcaaccttggctggcacgagttttagttacacgtgcaggcttatactttccgccatggtcggtacttcgaagcggcgattgacttgaaggtttactacttgcgcagcaagattcaaccgagacgcacgagacagactgtttcagtggccgttcagagcaccgacccttacccagcgaagagcgttttcgaggctcgcagcatgattccttgccaagggcaagaagagcacggcagatacaccccagtgctgtaagcctagcagcatactgctctctaactgagcgatggtgtcgattgcaagctctgccctgaagcgttgcaccttctgtcggtgtggatgtcgaggaaagagctgcattagacccaaaattagtagagtactatgacataagccatttatattcaacatacagtaaccagctgcttccatgcatggtatatctgaccccgtatgacactcacgtaaagccagacgatcaaggcaggcttcatcacagcatggcgaaggcttgtcttggcagcactctgtcacaataggttcaacggaagtagcatgttcactcgaccatggggtaccggagccggtgtgtgtgtgagggtggcccgaagaaacactacagcttaaaattttagatttggcggtaaaatttcctgcgcaacaagctacgttagcggaaaaagcatcaagacgacggatattcttaccagcagccgaggcagactggtcgccgcagcagccttcctcgcaagcctcaggcagagctgcacccttacaaggatcagtagggtccttgcatacggggtcagcaggttgggcagaggaagttgcattggcattattatcatctgttttgtcgttgtttcggatagcgctgttcctataagacttctcttgacttgaagtctccgatgaactgccacaacaattcgatgaactattcgatttcttcaactcagctttatcaatcgcatccgcttgagagggcgtcctttcacagcaagagcgtcccataatgctggttggatagttcaacgtggagtcgtgggaggattgtggggatctgggaccgaggagtggggtcgtcttttggcttgtttggcttgtttggcttgtttggcttgtttgcagggaactactcttcgtagtacgtactagtactgcttaattaaccctagagagcctttcactaactacttacacgccagttaccgtatttgagtagtaaaccaattcattattctagcaaatcattccaagcaaagtcgagcagagcgttttgttgtgtactctatgctttctctatgtgaaaccgaggtgaaacaagaaaactagatgttggatggtaatgtgattcccggggccccgcaatttagatactccgtacagtgctgcagtaagtactaccatgctcgtgaatacttcaaatacagctattgcccgctgatacggatgtgtacgaatgcttggcagttcaaccttacaaggtcctccgtgcttccaaggttgcatttttatcagtggagcccaggtccggtgtttatgtacatatcccgaagtccgttttaggcaatgaatatccaaggcaggggtccacttaggacgccagcctacattctattggttcctgggaattgcattaaactcaaagcacgtggaaatgaagtttcggccgaaccggctatgtctcggaaccgacaaccggccccggtagtgcaggccctaagtcgttccctccttttaaaactcagcccattaccgttgcaacttgcaagttggccttggattccccgcaatacgccctgcagcattccacaacatccatacttaccctttgggacagagcgaaacacgaagctgccgagccgaccgagccgaactatatacttcgccttgaacaggcagcaccacagtttctggggattggatgctcgataattataccaaatgatctattgtgcctaccaggcctgtcgattattggaaaggcagcacatccactggaataggtgttgaggcagcctttcttcctctctgtccctctcagggaacagctcaattcattccatgtttttctttctcattcctattcactacaataggacggcattcttcaactccgcatggtttccattacgtggtgcacgtgtgcgtatggggtatactgtgtgcaaagaaacaagaagtaaatgacattcgaaaaactgactatgacagagaccacccacagccataaagacagggaaaaacaggacaaaaaagcagtcggaaggatacaggctgggcaacaacaaaccgaacacttgactcatggctggcagttgaccactgtggtgatcattcaatgatgccccgaactggaacccggcttcagacagtatattttctgcacatccgccaactcagcctcgaaatcgatctcaaggtttttcagcagaccgtcggccaaatcaaaaacccaaccatgaacgatgggatactggttctcttggtagctttgttggacagccgcggttttgatgatattcctacaggattcaatcacattgagttcaatcaatcgattgtatcggtcgtgctcgtcggatatttcgtcaagttcttgctcgtgcaagcgataaacatcgcggatgtttcgcagccatgggttaagcaatcccagatcagcaggtgtcaaggccgcctgaacacctccacagttgtagtggccgcacacgatgatatgcttgactttgaggtgccgcacggcatagttgatcaccgacatgacgttgaggtcaacattgggcactaggttggcgatgttacggtgaacgaacacctcgcccgcctccagacccatgatttcgttggcggggacacggctatcgctacagcctatgtacctgattgccgttagacgaaaaagacaaagttggagcctatgttgcttacagatagtctggtgattgtccagcagcaagcttgtcgaaaaaggtcgcatccgtctcttttttcgacgcgacccatatcttgttgttttggaagatatggtcgagcgactgttggagatagtgattgccgttcggttcggaggccatcttgtcagagtgtacaaaaacttggcaaatatgaacgtggtttgaggttttggtggtctcacgcagagcagggagcagatccgaatctgttgggacctgtcgaggggtttgtgcttatataagcacgtgtcaagacctcgggaccatccgcaaccttttccaaggacccggtcctttgccttcgggtattgagttatcacggtctaacggaaactcttagtgtcaattttacaccgactatttcgactacagcttcactatctcaagagtagccagccacttatgcggtctgtcatgtcttttgggtagtatttctggatgtcttgtttcggatatcccttatcggttttatagctagacggcagaaaaaggcggaagaaagtgtagaatccttcgtcaaggatgttataaaccaatgacgccatgactctgattctgccattcacattctacggtcagcatcataccgccgcccgcactgaaccgccgcgtttccaaggtcgcacacctcggcccgtgtcggagcggcacgcaagaagttgacactcgggtgagatagccaggggaaatagatcggcaccggcccgcgcggattcgagctcgtagctctcgagcaagccgaatttcgggtgccaggtgcacgataagccggccccacactgacgccgtccgatgagatctgcagaagctgatcgggtagcggctggaggacgagaagcggaagctcttgagcagcttacctgctcgcagccgatgtgctgaccaggcggctcatgtcgtcgctcgcgaggctggggatgcatgctcttgccgtcccagggtggccgtccatctgcgcctggagcagggacactttggttgggtcagcgaggtgcaggccggcaagacggtcccgtcgggagaccatgcaagcagtcctagatctagatggtggaatgagtagcgcttgcgcttcattttgtgcagttcacgatgttgacgacaccttctcttttcctccccgggatgggctgctactccgctcagacaatcactctcagtttgacttgcaactaggggtcgatcatggttcggaccacaaaattttcgtattctttaaatttcgatatttgatccctactttatctatgtccatctcctggactgagacccgagaaagctgtggagggaaagttttcgatgacctttggaaattggtgggtctagacgttcatcccagaagaataggatagtgatgcagaatatgctagattgtgaattatgctacagtacattaaaaatgcgacctacaactttcgcaaagctccgtcgttcagcatgaaaaataacagtatcaatcctatgaatttccgacaggtttgaacaactggtccttcgggtgtgggggataaatacggggcgttgtagctgccaccgatgccaggtaccaaaaatactatttggtggaaagcatggtgttactttcaatggcgtggctatcgatgatcggtgaatactggatcatccacacgttgttcaccacttggcggagtatgactgtttcctcgtaggtcgagtgaaaggcaaatggaagcccttgatcaatcatgtactcgaccacttggccgattgtatgacgcatcacattcacgttgctgaaccgacctctcagtttgtgtaccttaacccacggaactttgagctcccccacgactctgagtgaaagtgaaagtggaggattatccgataccaaggcaacatcaggtaccttggtatatccagttccaaccgacttaaaagtcagcaaaccggatattcacgtgttgtgcccggaagacagctccaagaatctgccccacagattgttcgaaccgtccctgaacgcctgtttcatcggcaacatagacttcttcttctctcaggtcccgaccgtcaattttgtagtcgattatggcttgggaccagcttgtcgacatgctagcccagacatcggcatcgaagctttgccatcgagatacacgacccgtatatctaatattgtgcaaggcagagaatttggtcgtgttgggggcaatccgaaggcctgggagagcactcttgactgcatctttagaaaggaccttctcaggcattatctgaacaaggcctcttgtcagtacaccaattaagcttcacgtgcaagactctttggtaatacccactaagaaatagaaaattcaagatgcgcaaattgctgggttgggaagcaatcaataagagagagtgaatatctggatagatggtaatgatgatgatccagctactcccatgaagccctctgaatagttcatggagacaaacggcctggaagccacaaaggtctcagaggggccttgaatggcagagaaagcccaagtgtatgcctaaatgcagcaaaatcaaacctccggacattgaacgaattatagagaaagagctgatatatctcgaatgaggtgcgactcatatcataggccattaggtatattacctgttgttacttctcctacactaagacctagataacatccagcccatatttgagcagtagactaggcagaagtaggcgtttgttagcacacctgcggtaagatgggccagcagcatgcaaacaaacctagtacgtagagtcaaagtaatgatgcagactgcctttttgagttgatatacccacacccctaagatgcctgattcttgccacattccttaggcatttgatcaattggatactatctagcatctagcattgagatcccctttttcagaattgaactatcttgattattggtgttaaatagctttgggggatcttttaatgggacgacggtaagtgttagatcatctccatatggcttggtgggtgattaatcagatgttaatagtttggtgtctggtttactttaaattgacctcacaaatttgtcgtcatttccatcgtctccttgatctgaccttcctctatctacaattcattccatatcacaacatcttccctatcggacactcacgatgcccgaaagagagcctcgtcagtttcttccccagatgattggtgaagggatcattacctactgcccgtattctgatgaccctgtgttatcttctttttacaaagcgcgccaatgggtcatcgtggagaagctggatgaggacctatacacggttaccccagaggattccgaccaagacatgggccccgcatttactactggaaaatttctttgtcgccgtggacagcacggataccatgccttcatgcatatacacaaacaaatccctctgtatggcactgaattcaataggtcggaggatcgggagaatcaggcttccgatatgtctcccgtggagctaaatgccctgaagaagtttacagagaatgagtgtgccgctgctcctaaactgcttggatatcaaattgatatacaagatccgaccgaccttgtttctggcagatttatcatataccttgtatttgacaaggtcccaggacgtcctcttgaatttgacgagttctggagttttcccttacgcaaacgcaggactattcgtgagaatttcagagtcgcctatatgtttgttatacagtacaattatgatcacgttcttcgagctaactagaattagggaaattctgaggcttgggtaccagcctttggaaccatcctcattacagctcatatacgagagagaggaagacgatatgtatgttctactatacccctgatagcacaatcaccggttttgatatagctatgaagattgatgaagagccttactggacagacaacaactttgtgatatataacctagttctgcttccctcgaaatatgagaagtacgttcccaagaagaaggatatcaaaactgataagaacggctggaggtggtgagaaggagaattgatatcaaagaaggaaccatggggcaatctctgtcgctcggtctcatgtgtgtgaccaactagcttacaaagaatactaccaagatctatcacaaacgattctctctattcactttaagtactaggaaagtctcacccccgtagaatcgctcactacaatttctcaactcttcagtctacgtccacgtctctgtaaagctgtctccatagaaattccgctagtaggtcttgaaataaaggatttgggagtctttggttggaaatgtgttctgtttcggcgccccttccacaaatttctcctggaccacaatcttctgcggatatattgccaatatgctatcctcaccgattcacccctgcttttctaagctggccatatacttttttcaatgtatcggacatcacagcctgtctgcccagtttctaaatacgaagatgtcattcacgtcaccaccgcctaactgatgaaaaggataaggctgacgtcgagagcctcatatcttggcatcttggcatcttcaaagtggaagcttgacaatagaagcatttcaataatttttgacgattgcgcactgtactacttcacccgtgactagggttggggggaggggggaggtgagaggctctggacgtttgaaaattgcgaatctggagctataatggtttcaacggagcaactacaaacttgggaaagatcctcgagtgcacctacagctgtcactgggtccgtgagatggtcagtgttacattcctataccgattcgtcattcctcctcaccatcccgtgctgtcgcagcccactctcctgcagaagcttcatcttaaccggaggaggagtcgatagtccaatgcaacgctataacgcaattgaagcagcaaatttgcccttgaccgaaatttctgttggttctctgtatttattgttgattttctccattggcaaacgtcggtccaccagctgcttttgattcccaatgagtatgtagactgtactggttcatcaaagactatgcagaactgacattctggacaacaccaggtaatagtgagaccatccttacagacacctcggtggtggcagcccgcggagtgagcgaggtgaagtcgctgcatttggatgaagggttagggggggactctcaggcatcgcaggaatcccaggaaccctatgatgatgtgttcacccctccaaccgatgaagaaaatcaaacattgcgcaaagtggccgccaatctcccgttggttgctttttccctctgcctggtcgaatttgccgagcgcgcgtcctactatggggcacagacactcttctccaactttgtggaattcccactgcccgaaggtgagcctcattttcaaatattcagtgtcgagagtgtcattaacaagtataatacacaggtggcaatgccgccggtgctcctccgcgcggaacccaaaagacagccggagctctgggatggggattacaggccagcaccggcttcgtgcttctattcaaatttttggcctatattgtccccatcttcggtggttactgggcagatacttatgtcgggcggtataaggccatcatcattggtgtgtttatctgcggcgttgcccatatcatccagatcgtcggcgcgattccctctgttctccagaaaggcaaagccaacgcagctccaccgtttgtcattggcctcttacttcttgccatcggtgccggtattttcaagccgaatatctctcccactgttctggaccagcataaatcccagacgccgtacgtgaagactctgaagtcgggtgagaacgttattgtcgaccccgaaaccaccaatactcggaccatgctgctgttctacatgtttgttaacattggtgctttctacatgttagcgacaacctacgcggagaagtatgttggatattggctttccttcctgctatcgggtatcatttacttctttcttccaatcctcctccttgctgtctataaaaggaccaaaaagcaacctcccagtggaaacaaagagctcgccgaagcctttaaaattggatggactgctcttgtacaaagcaaattccagttctggcgcaaagacttctgggatttagcaaaatctgccaaccttcgcagtaaggggatcgaagttagttggacagatacctcagtatcaaaagttgcgaaaacaattggtatcatcatccctcaggcatattgatcaacgaattctaacatcattaacagaggcatgcgacatcttctggtttttccccatctacaatttaaacgacggtggtatcggctcagtcgccacgaaccaaggcgcatcaatgatcacaaacggagcacccaacgaccttctcaacaacttcaacccgctaacgattatcgttgtcatcccgatcctgactttcgtgatctatccgttccttgagcggcgcaagctgaagcctggccccataacccgaatgacgattgggttcgctgttgccactttagctggcatagtcggtgcactagtccaatggaaagtgtaccagctctcaccatgtggcacccacgcatcaacgtgtgacgacgtcgccgatatcagtatctggtggcaaattcccaatacatctctcagcgccataagtgaatgtttcgccaacgtcacggcgtacgaggtggcctatgctcgtgccccaaagagtatgaaaggcctggtgattgctgttttccttttcatgacggccctatctagcgctcttggtgagattcttatcccggcgactgcggacccatggttgatctggatttgggctggtcctgctgtcgccctggcggttcagactgttattttctggttccggttcaggcatttgaactctgagaactacttcgccgataatgttgtttctgatctggttgaggaggagcaagtgtcacttaaaagggaagcttgagtttcatcgtctaacaacgcaaagattggagcggggcactgcttgtcttgtttcatggatgacgaagtgcaatatatttgccaacttcattcactctcctctactattcaaatcttttcggaagaacgcttgacttaagatagacagaccttctctgtaatcatctgactggagaagagtcttgtgccggctactgatacggttacgttcgagtaaaaccaagtgaagtaatggattttagtagagcagattatattgagctatctgaccggaacatagagaattgtcgcaagttctagtccaccgttgtggagccaagccaagcgcctgtgataatttccaatccgtctttcaaccaatccgtttccaacgttgttgcaaagtcgaacccatggtcagcatctaggccatgaagcttaacaattgcatcgggcgctttttctcgcactaaatcaaagaatcgctgagagccctcaaattgcacagctgaatcctgctttccatggaaaatgaaagttggaggaagtttcagacctccggcagcagcgagattttcaaccctcttcattgggaagaggtagtcttctgacccgaggaactctagcaatcgaccattttggaaaatcgagaatgccagctttagacgatctgggggatctgcagcagtagccacagtgggcaagggtgcggttcgcatggctgcaatgtgttcttcaataatttcattcggcatgttgggaactccaaggatagttttgggatatgcctctgtgtagaactttgatttcaaatcaagaactggataggctgcgatgacagcacgaatttccgatgggtagctgagtgccagttgaatagccagatagccgccttacactcaagtcagatcatttgttcatgcaagagttcactacaaaagactcacccgcgctttcccccacaacaatgagcttgtcgagatcagggacaatatgaccatatccagcatctttgattgttgcagcaaattttgggctgtgtatccaatgccaaaaatcgtccatgtctttcaatatatcctttcccgatacttcaggcagcaaacggtagtctggagccacgataattgcccctgttgatatagcgtagtccaacgtccaattcgcgaaccaaacaggatagcgactagaaccagtgacctacaggcaagttaattcacagtcgaaggattgtgtagtcttcttagtgcaagtagctcataccaaaaatccgccatgaatccgtatcataactgcacatttcgaaagttcttgctgtgatagtatagcccgagggatgagaatatctacattgatgtgagaacgaccctggttgaagctcttataactcgtgttgatcacttgaaatggctcatatttatcagcggtgtcaaacttcgagaaaatttccaccaagtggagataaggatcggttgccatattgatgctcgatatgggaggagatagggcaaggaggtggggttgttcgttcgtttatgtaccttgcgccttcgcatgacctaaaggggaaatggagcgaaagcgaagagccgagtacatacgtaccccaagacccgcaaggttcggctagtctgtaagtcatagagctacggacttgactaagcaaatgaaagcatagccgtacgatagatggcagtatataatactggcattgttggaatcttgcgctttgtcattgaagtctagttagcgactgcacgaactatgcaaacaaaccagcagatgtaattgtttcacagctgaatagagatgtacatggtgcaaacagagcaaatagagcaaacacagcaaacagctgatcggcatatcggcgatcggcgcgttcccccgctgtaaagtgattgcgtaactacaggaaaaaagaaagaacctccaacaatttggctatttcggcccatttatctgtccaagctgcactgtaacttattgcgatctatacctctccattgactcgccatcgatagactggaacctctggttaaccgacaagatgggccaggacatgtccccgccacagggcgtcacatcccttctggacacggatctatacaagctgacgatgcaatgcgcggtcctcaaatacttcccggatgtttgtaagtagccctaaccgagtaatggggatctgggctgatctgggcgcagatgtggcctacggctacacgaatcggaccccgcagatgaaattgcatcgcggggcatacaaatggcttctagagcagatggacagtaaggatatcccttcttgtcgcaatcgtacagcttctaaccaatttgcgtgtagaactggccgtaattcgtgtcaccgccgaagagcgcgaatggctccgccaaaagtgcccctacctcaatgatgagtacctcgccttcctagagaccttccacctcagaccctccgagcatatcaagattaagttcattccggaagaagatacgggcagcgatgacgatgcaggagacgtggagtacatggttgagggtctctggctcgacaccatcttgtatgaaatcccgctgctggcgttgactagccaggcatatttcatgttcaccgacaaggactgggactatgaaaaccaggaagataaggcataccgaaagggttgcactttgctccggaatggctgtgtgttctctgaattcggttcgcgccgtcgccgcgactaccatacccaagatctggttatgaagggactctgccgtgcggcagaggagggaaagaagcagggctggcccggggtgttagccggaactagcaatgttcactttgctatgaaatacaatactagtgccgtcggcactgtggcccacgaatggtatatgactattgcggctatcacggacgactaccagaatgccaatgagttggcattgagctactggcttggctgctttggagagggggtatgtattgtcaactctccggtatttagaaacacctcaggctaactagagaaacacaggttcttggcattgctcttactgacacctttggcacaccggctttcctgcgtgcattcagcaagcccatctcagtgccaaatcaaaagggtggtactaatccgagcacgacaacctacgctcaaagctacaccggtgttcgccaagactcgggtgaccctgcgttcttcatcaagatggtccgggacttctacgatagccagggcattaccgagaccaagacagtggtattctcagattctctggatatcgagcactgcttggagtacaaaacaattgccgaagaggctggcttcaagccaacctttggagtgggaacattctttaccagtacgtttgagttttgcaatctcctgcaacacaaactctaacgaattcgcagatgattttattaacagatcaaccggactgaaatccaaacctctcaacattgttatcaagatcgccagcgcgaacggcagtcccgctgtcaagcttagcgacaatctgggaaaaaacatgggcgattctgagaaggtccaggaagtcaagaagaagctgggctatatcgagcacgagtgggaagagggtgatgagagtcgccgctggacgaaaaaggcatagactgcctgcctatctgcaccatacaatttgcctttgccactaaatcataggccatttgctaaagacttggtaaacatgagcccatgatcatattgatgttggagaggtggttattgatatttgctagaaataatgtgccaactccatagagaataagaatacatgatatcctgaagaggtctgaattccgttcctccgcaacgaggctctccagtgaggtacacccgagccatatgcactaaaagcacccaaagcttagaccatctcaccttcctcattttctccgttgccttcgtcacttcgttcgcttgttcgtctccaacgtgctcatagtatcctatctgagccatgggggttggggattatttccatttatactcacttttgttatcgttccttcctcgggcagaaagctatgaatatcttccaatagttgccaagttacacgtcaagggacgacaacaaaaatcctaatttgttatacataacctagaacatatcatccccagactcgaaccccaagtcccgatctagatcgccagtgatttcgggccttgcatcattcattgactggtgacgaaaatgcattggatgaaagtcatctgtatcattcaaagtaagacagaacgcatcgtgattgttttgatcttgatctagtggaggtgttgccttttcaggcatgcggaaggtttctgtgttactgtactgattcagatcagtgtcttgaaacagctcctgtgcccagtcgacggtatcttggtcttggggcgggggtgatatatagggtttatcttggttgttgtttggattgggaggggtttgaatatcacggaaggagtcgatgtcgatggacataaagttgaaaggattgttgtctatgatgccaagatcggaatcaaagtcgaagtcattagggaatagaggaggtgcgggttcatgtgtggtttcgacgctgggcttaatatgatgtatattcccctgagcagatgaagtttgtgcttgcggcttcgagatcttggtcacagcaggtagatgtgcttggggttggaatatggaattgacattgcttggtttcctggtcgccaaagacgttgcaggggcattcaagttgtattccatgacttggaagaatgtactagaggcgcccgcctgcattttgatagctgcctcgatgttggcgaactcttgactggcggctggataaatatccttgagacagtgaaggccttggatacaacgatgaaagttgtcgacactgctttcgcggacagcggggtcctcggacatggtgttggtcaaatgcgccacagcggcaggtagaatcacagtcactccagactgcggtagaaaccttgtcaggttgagctgattcaggccttgaataatatgtgtgatccccgcggcagcatcgttcatttttgtacgggcagcgttgcgccagtccgtccgcgatttagattgatctttcaaagcagtcgcccgaggtcggtgaagtgcactgctggtagcatgatagagcatacgtaacatcgcaccatgaagcagcagcacattttcaccttcatagaaggtattccccgacttcgggatgaattgcgcatctttagggagggcactaagccaagagtcgagcttttggccgcatcgcgcaaactcagactcggaagcctgtcgagggataagtgtgactgtggttcggtctgtggcaccaaatcggcactgagatggtgtatattgtgcgaataataccctaccaatacattgacagagcttcaccttctcgatgaacagggtggcgaggcgtttctgatgtgacacatcttggagctgacggcaacagaacttagccaccacatatggagagaaaggttcaaaatcaaaatcatccattctgagcattggaacactgctcgttccatcattaacctgaagcgggcgccgcatacccatggcgatcagccgatctcgagagtacagacaccaccagagccgagaacggagccgttgagtccgtatatcaatttcatctgatgcagggtctttgttcaaaccgattgactgtgcttgtgtattacatactccaatccaatcccatatatctcgctgtgggctgttctctgaatcagcccagtaggtcatcaataggagtgtttggagaatcacgatgcgatcctcttcgcagtcgagagaatagagtaactattgatgatgagttagttcactgatgtcgcagccccttgaagaaagacaaacccttaatcgagtatagaacgcattacgcgcacttttccgggttgaatacccagcatcctgcaggtgcttaaggtcgacgaaagccgtaccaacaaacatgactgcctgaaatagtaagatgctaacatttccctctgggtcattttcagccacacagcgtaagaactcttgcaggttcaaaactggcatgaaactgtgtacccattggatgtagcagcgcagaagctcatcccgcaacccactctctggaattgagacggcaccacgaaatcgtaagaactctaagtcttctggggatatgcgagccggcaagggttttaaaaaccggggctcgtcgtccagtattgccgtcagtgggtcaaagtccgggtctattaggtcttgaacggcagacaccatgtttgatagaggcatcgagtgctgcacattggggttcccccgtgtacgccatatcccggcaggttctgactcgtgtaaccatggggattgcggatcgtatccatgaagatggtggcgcttagccgtgggctcttggcaagattctgccaacttacgtttgagagaagttgaagacatgggctctcaggtgtgatgtgtcatgtggccctggttgggggtagacgtatgcgattttgttccacagggacctcaacgcataagcctgcaagaaggcggtgttcggaactggggaaatgtgggggcaactctgcggggtcttggcgcctggggaaatcggcccaaatatcgttggcttgatgtcattctgctccattggggatttgaattggtgaatctagttggctggatcagtgatctatatacgatgagaaatgaaattattatagtccaccagtttttgaccatcgcttcttcatataaataaagtacgtaggtcactatacgtactattttctccagttagggattcctattgcagcctcacttttataaggccctcggagtcagcccaccgagtagtttcaaaagacgcccgtgataaatttgatcgaaatcatgatatattaagtactcagttcatactcaatccgtcagtcggtactcacaataggattatttgtgaactacttcctgatcaccatatgctgcatactcctactccgatcgccgccctcaaaatatccgttacaacaagacgaggcaaagaaatcaagtcgcagaaacagcctgttggttgtttatttagagttgcccgtgcgtaagtggtatattccatctttggacatccacatagcttgccttcactctatcttattggccacggcttgttggttcctttgcgcttcttcggatacttgctcagtcatgggtaagatattgtgtttttctttatgaaggatgatcgctaagcgctacaaacaatcggaggcgaggggctatatattggcgctcatatagatgacatactatctgagagaaagatagagagatggcttgagccaagttgcggtagaatggtagaatggtagaatgggaatttctagtgtcattgtacaattggatagacaaggtgttcagcgatagtaaaatatatatcgctgcgtgtttcaggcatagattcggcattgctataattctgttgttttacctcatgtatcaattggcgtcttattctacactgttagagatttaataatcgacacaagaaacgtacgcatccatctcaacttgttgcagtcgctgatagctactcatctagtgttgtcagccgattttcaagatttgtacaactgtgctattacaaagcgcagtcggatatggctgttgcctcagagatctagtttcagcctcttccaaatcttgagggactaggtcataattatcacgggccaaaaattggattgtaccacagccggacatccagcaaatggcaaaattcctgatattcgtgaatctcaaaacaggacacagcatgtcagatagtacatgccctgccaataaaatattgtacaaattatccaatcgaaaaacagccgagcgaaagatgctcccgcatcatgttttcctttgaccgacgccgatatgcttccacaggtttaaaagagggagtccgagtcgtaccaccggaggtatagaaagcgtgatggttttacatgctgcgcgatattagatgaggctcgttcggttgatctcgatgcaaatgtgttgggttggctcgacttacggaggaaggaggaattctccgaagcttgagtggaggaacgcaataccggcctaaagatattgtcagtttcatggataaaatcgagatgttaaaattgttgattaggcaacacgtacgccgaagatcacgatgctgcggacaatggtcttgttctcggggttggtggcctcgtcgtagacagtgcggacgaagcctttctggggccgagagccggagggaacgatgcgctggtgaggggccattttgtatgtgatgtgagggacgaatatagagaacgtatgttgatgttggtgttggagtgatgatcggacgtcgagaaatctgcggcctcgggacgcttggtcactgcgcctttagctcccgtggacaaccgtatttattttgcccgcgcagtgaaggacaatgcgacagcgtcgtctggcctgtcctttatatctagatctcctcactgctgcttcggatatatctctcccaaaaccaatacttctacatatatcactgccacggatagtggttgtctccacattgtccactgaaccggcgttttcgccgcagcaaccaagatgaacgtcgatgagctcttcaaagtgagttccaagttcacctactgaattgatggcatggctgatgagtaaagaaatcatctgcaacagggagcgctaagcgcaagttcgagcccgtccaagatccaagtacgccctttcctcgcaatgcgcttgccgcaaatcctgacgatgacagatgaacactacaaatcagcaaaacttgaccccagtggcgatgtaagatcaaatggaaaagcaccaatggtggaggacgagattgacgacggtgaagctggacccgagcttcctccggacttcgaggacgacgtcccagacgacgaggagggccgcttcttcggcggtggaatggagcgcaagacagcccaagcaatggaatacatcgatcagcaagaggaggacgaggctgcggtatggaacttttggtacacatggtatctatccaggggctgacggtatacttatctagcccgagaaattcgactctgcgtgggtgcgccgttttgcattgaatttcgagaagaagatatccaagaacgctgaactacgagcaaaatttgagaatgatccgcaaaagtaagtggataccggacatttgtatgtaccgggtgctaatgatgcttcaggttcatggcttccgaggccgacctagatactgaaatcaaaggcttatcaatactgtctgagcatcccgacttatacgaggagtttgctcagatgggatgtgtggcatccttgacctctctcttgtcgcatgaaaacaccgacattgcaattgatgtcgtccaaataatcagtgaattgacggacgaggatatggaagcagagcaagaacaatgggatgctcttgtcaactcaatggtttgttgaggcatggaagtatcagtaccaagtgctaactatcactagatggaggccgacctcatcgaattgttggctcaaaatctctcccgacttgatgaaggatctgaaacagatcgagtgggagtatactacgtgttaggtgagtatcatgtttcaagaaatactgcgagaattttctaattcaataaaggtgtaatggaaaacctggcctctcagacatcacacgcggagaaaattggacaggacgctgcaatcttgccctggatcctgtcccgtattcagcgaaaagaagcgattgtcagccaaaacaaacaatatgccgcagagattctggcaatccttttacagtccaccccaaagaatcgcacgaaatttattgagctcgatggcattgatatccttctccagctgcttagtgcataccgcaaacgcgatccagctaaagactccgatgaggaagaatatgtggagaatctgtttgatgctctgatctgccttgtcgaggaagacatagggaaagacaaattcgtggaggccgaaggtgttgagcttgcgctgatcatgcttaaggaaggcaagttcagtaagccacgtgctttgagggttcttgaccacgccttgggcggagtgggaggtgccccggcgtgcgagaggttggtggaagtagctggcctgaagacagtgttcggaatgttcttgaagaaagtaagtttgctctctcgcagtcaaattgtggtatgctaatatccatccagcaagaaggtcaaaacatcgaacatttcttgggaattttcgcctcccttctccgtcttctgcctggtggttctgctccccgcatccgcacgttggccaagtttatggagaaggactacgcgaggatcgagaagcttatcaatctccgacgcgagtatgccgcacgtattttacccgtcgaacaagcgattgaaaaagaacgcagaacgtttgataaggaggagcaagaacttatggctagtgaatggctatcaaggcggttggacgcgggtttgttctcattgcaggtatgatttctcttttgcgatggcaaggctccttgctgacttgctgcagacaattgatgttattttggcgtggctcattgccgaagatgatggagcgaagaggaagatcgtctcacttcttgcggaccgtgacgaagatttgtccctgatccgtgggaccttgcaaggtgagtaatccacattgctgtaattgccggaggctaactcgagtagaacaaatcgaaggtctcggagaggatgacctgggtcacacagagttgaaggacatgctaagcactcttttgcagtttgtttgaacaatgacagaattgtaacgtatcataataccaatgctatcagcaaatccaatccacagggtcacctcggcgccagtacacatagatttcactaagatctaatattttcctcggattgaaaagttagcttgttgatatagacatgtagaccaaaataccatcacatatgtatagagatcttagtatcttaactacgctgcttcgaaattatgttgacaggtagaaaattccagctcatgtacgaccgaatcagttcagaattccgaactagaagatgtcaacatgattatatgaaatcgaagtatgaatccaagatatttaatattccttaacaggaatacgtcccattgtccgttatggagaatgggtatgtatgtacctaaggggtcagggaatgcgcctgacacaactttttgtatggataagatgaactcaacctttcgacgatcctgcgactaccacggctcgatacaattcgtcaaaatacatgatttcaaactccagtgctctttattaggatctccccttcgttacgttaccgcacaacctaacgacttgatccgtttcttgtctgtttccgtcctcgacgcgcaacacttgcgcgccgggtggcgtacttcgacacagttatggcgagtgcgtgttcgctttcgctggttgaggtcgatggatccatcgcgtagggaattgcaggcgtagtcgaggagttctggtggtgccgcgctatcatcagacttctccgtagacaatgaagagttagccgtgggctgatttcggttttatatccggcccttcgctttcgcccctggcccctttgtatagaggcagttgtcggggagacgcttgataaatctgtacgcccaattgtaaccgagcttccactcgatcttatggcgactaagaatcgaggtagcatagtcgtgaatcatgtcggcagtcattgtccaaggtacgaatccactgaattaccgcctcctcttgctcagcatccaatgctttgtgggtgcctgtacggcctttttgcgattttgcaccattgatccgaccgcgcaataactggtacggaattagattcccgcgccaatttggcgatttttggtttataattttcagggtatgatcgcaaggcaattccaatgcgatcttccaattcttgggtttatttagtcatatttggggtgatggcaatgaataaactgtggtaggtatacaaaaattatgttgttgatgaaacattgcgccaagtggcttggcggtcatggatagtcacgtgcatccacgaccatattgctagggcggtgagatatgatcacgtgcatctacctcatcgagactagcgcatggctgagaagcatccagacatctggagatcagtcccttcatcggaatattgtcggggagcctctctttcatcccccccagtttgtcagccttgctttttgcatctgtctctgactccttgacttcataacaaccccactttcgaaaactgtcaggcgagcgttgcagtgcgttgggcgattattgcgaagctcctacgccgacgcgccttgcgcttttctaccttcctacacctccgatcctcattatcttaatcaacacctaacctcaatttatcgcaaccatggtggaatacgaggagacatacgaggaggatttttacgatgaggcggacgagggcatcacctctgaggattgctggacggtgatttcgtccttctttgactcgaagggtcttgtctctcagcagttggattcattcgatgaattcatctcttcgaccatgcaggagcttgtggaggagcaaggccaggtggttctcgaccaaacactccccccctccgaagatgaagtcgaaccgatcgttgtgcgccggtatgagctcaaatttggcactgtcatgctttcgcgcccatccgtcacagaaggcgatggtgcgaccacgatcatgttgcctcaggaagctcgtctacgaaaccttacttacgcttccccactttatctcggtgtcacaaagaagattatggaaggtcgtgagaagatgggcaagcccaacgacgacgacgataatgagggcgagagtgatccaaagactcaaggtacatacctcgattgggaaacgaagcagctgccccaggagcagatgaaggaggaaacagtttttatcggaaagatgcccattatgctgaaatctaagtactgtatcctcaaggatttgaacgaagcgtcactctatgcttggaatgagtgcccctatgactctggcggctacttcgtcattaacggaagtgagaaggttttgatcgcacaggagcgcagtgcgggcaacatcgtccaagtcttcaagaaggcaccccccagcccgacaccatacatcgccgaaattcgaagtgcagtcgagaagggctcacgtatgctttcgtcgcttacgttgaagctttttgccaagggtgacagcgccaaaggaggatttggcccgacgattcgctcgacgctcccatatgtcaaggccgatattccaatcgtcgtcgttttccgtgcgctgggcgtcgtttccgatgaagatattctcaaccacatttgttatgaccgcaacgatacccccatgctggagatgttgaagccgtgtattgaggagggctttgtcatccaggaccgtgaagttgccctggatttcattgccaagcgtggatcgtcacagacgaacctgaaccacgatcgtcgtgtgcgctacgctcgggatatcatgcagaaggaattgctgcctcacatttcgcagagcgagggcagcgaaacccgcaaagctttcttccttgggtatatggtgcaccgacttcttcaatgtgctttgggtcgccgtgatgttgatgaccgtgaccacttcggaaagaagcgactcgatctggctggtccacttttggcaagtcttttccggactcttttcacgcgagtcacaaaggatcttcagcgttacgtgcagcgatgcgttgagaccaatcgcgagatttatctcaacattggtatcaaggctagcacattgaccggcggattgaagtatgctcttgctactggtaattggggtgagcagaagaaggcggcttctgccaaggctggtgtatcccaggtgctgagtcgttacacattttcctcgtccctgtctcatctgcgccggacgaacacacccatcggcagagacggaaagattgccaaaccccgccagctccataatactcattggggcctggtttgtccagccgagacacctgaaggtcaagcttgtggtctggtcaagaacctggcattgatgtgctacatcactgtcggtacacccgccgaacccatcgtggactttatgattcagcgcaacatggaagtgcttgaggagtttgaaccccaagtcactcccaatgcgaccaaagtgtttgttaatggcgtctgggtgggtatccaccgggacccttctcatcttgttacgacaatgcagaatttgcgtcgacgaaacatgatctcccatgaagtcagtttgattcgtgatattcgtgaacgggagttcaaaattttcaccgatacaggacgtgtctgccggccactcttcgttatcgataatgaccccaagagtgagaactcgggcgggttggtccttaacaaggaacacattcggaagctggaggccgacaaagacttgccaccggacttgggcccagaagaacgccgtgaacaatacttcggatgggatggtctggtacgttccggagcagttgagtatgtcgacgccgaagaagaggaaaccatcatgattgtcatgacccccgaggatctcgagatctctcgacagcttcaggctggttacgctctgcccgaggacgaaacgagcgaccccaacaagcgtgttcggtccattctcagccagcgcgcccacacctggacacactgtgaaatccaccctagtatgatcttgggtgtctgtgctagtattattcctttcccggatcacaaccagtcgccgcgtaacacatatcagtctgctatgggcaaacaagccatgggtgtattcttgacgaacttttcgcagcgcatggaaaccatggccaatattctctactacccgcaaaagcctttggccaccacccggtcaatggagttcctgcgcttccgagagttgcccgccggtcagaatgctattgtcgctattgcaacttactctggttacaatcaggaagattccgttatcatgaaccagagcagtatcgaccgtggtctgttccgcagtcttttctaccgcacctacgcggacaccgagaagatggtgggactgcaagttgttgagagattcgagaaacctatgcggattgacacccttggcatgcgcaagggtacttatgacaagttggacgaggacggtatcgttgctcccggtgtgcgtgtctctggagaagatattatcatcggcaagacagctccgttggctgctgatgcggaggagctcggtcagcgcaccaaggcacacacaaagattgatgtgtcgacgcccctgcgcagcaccgagaacggcatcgttgatcaggtgctgatctccactggtaatgacgatctgaagttcgtcaaggttcgcatgcgtaccaccaagatcccccagattggtgacaagttcgcctctcgtcacggtcagaagggtaccatcggtatcacctatcgacaggaagatatgcctttcacccgggaaggtgtcgttccggatctgattattaacccccacgctattccgtcccgtatgactattgctcatttgatcgaatgtcagctcagtaaggtttctgctcttcgtggattcgagggtgatgctactcctttcaccgatgtcactgtcgactcagtgtcccgcctgctgcgcgagcacggctaccagtcgcgtggcttcgaggttatgttcaacggccacactggtcgcaagatggtggcgcaggtgttcctgggtcccacctattaccagcgtctgcgccacatggtggacgacaagatccacgctcgtgctcgtggtcctactcagattctcactcgccagcctgtggagggtcgtgctcgtgacggtggtcttcgtttcggagagatggagcgtgattgtatgatcgcccacggcgccagtgctttcctcaaggagcgtctctttgacgtatctgatccgttccgtgttcatatttgcgacgactgcggcctgatgacaccagttgcgtgagtattccgattcttcatttatacattttcgtcacacagaaaactaaccgtttttatagaaaactgaagaagggtctcttcgagtgccgtctttgcaacaacaagcaccgtatctcgcaagtccatattccctacgccgccaagctgttgttccaagagctggcctccatgaacattgccgctcggatgttcaccgatcgctctggggtttcggtgcgttgattaggttgctcaatactttacatttgtactttaatgatcttgctggaaaaatgcgcatctgcttggcctgtttcacggcgtctcggaggatcgttggccatcgcattagaataaccggccctacatacttgaattgaatcactttacgtgtggttttcccaggagagtcataaataaacccgacaccctgtttcctgctaccgacaacccatcttgtctgtttgcagctacaattacggatcataatttacagtgaacatagatgcaggtcgtatctcattattcattgatatctcagagtaagacctaaaccaaagcatgaacaagtccatgacatcgcggcgatgttctttggttgacgagataccgtttgtcttggtcaggccccctttgggtctaggaggcccaggacagatcttgtcatcttatggcttgtgctggtcacattgaccggcgcaagataagcttgtcggagtccacgaggctggatcggatgatccagggtggacgttgtctacatcgatgtattgggatcaatgtcttcgtcttcctctcaccacaccattatcatccccgcccaaccgcagcgcgaaaccagtacacctgcggtgcgggctgtttttggtttatcattttcagaaaagaaaaaaaacacaaaacaaacgcaatgaccaagtctcaccagaccggaaaaagtcaagcgaaagaacaaatagagcaaacaacctagcgaggtccaggacctgccggagaaacaccatctaccggcggacaacaataccctgacgacgaacggcattgcgagcacggcggtactcctcatcactctcgcaatcagactccgaacagctgtcatcagaagactggtatccacagcgggtaccaccacagtcaagcttgacacggtcgcccttgcgggtgataccgtagcgctggcagcggcagtgcacgggcgggtcgctcatagacgagagcgaggaaggcgaagtcgagcccgacgacgaccgcgacgaaacagacgacccggccgagctgggcgggctgttcgagtacgagtactcgtctgacagacgggagccggcgaagcggcgggtcagctcgtcgacagtcggggggaagtctgcttcgcggagttggcgcgaggcgtagttcttggttggcttggggtgctggatgcgcgagggggacagggcgcgaccggtcacgacgtcggcgcggctggtcttcggggcggaggaccggctggtgggcttgccgccggggacatcgaggatgttgagcttgcggccggtggttggctcgacggtgtattcgacggcggggtcgtgcgatacgtggtacccgtccatcatgtagtagtaccagtagcggcctccgagttggagcatggaggtctggaagcggaacttgccgacccaggcgccgggcttgccttcgctggagagggggatctggcgttggtagttgtcccatgaaccgaccaggtggacggtcttgacgttggacgaggtccggagggagaacttgagttgaacggcggccatgatgaatcaaatgtatcaaaaaaaaagttgtttaaaaaaaaggtgtcgtagggagcagaagatcaagagtatcgtatagttagaacaatctaaaactgccagagtttgattgtcaagtcgggatattggactctttgatctttggggaaccggtccgacaaagaagaagataatcgagcgagattatattaaagggtttgttgtagatgtctgttgaacagcgaaatcaagtcgaccggcgacaggtagactgggaatagttgtaaaatccgaggaaatccgtagcaagtatatcccaaagagcacagctcgtttgagggtagaaagggtaaagaatattagaatagtatagaagataaagaaagaaacaaaagtccaggcaaccagtgctcaggataactcgaataggacagagaaacacaacaaacgctcgctgaagaagaaaaaagagaagaaatctgcctcgaggtggctatggcattcttttaagccggtcaattcgatcagcagtgcagattccgtcctggaacttgggcgcgtaactgacgatgttggttggttggatgcaagttgcactgtgatgtgctgccctcatgcctctggccaatgactggccaggatttaacgctggtggccggactagaagaggggagagtttgtgaatacgaaaggccattgtccaagcagggccagggattcgaagtctgaagaagttgtcagcctcggtagattaattgtggcggggtctttttttttgcagggtattgaaagcctaatagtataggtagaacagataagattttctggatatgaacacgcaaagtaatattcggcaatcatttctctgagcgacagattcaattgataattgaacgaaaggcaggcagacaggactaaaaataactaagtagaggggtccttaggtgtaatcgtcctcgctaaagtcatcgaaaatccagttttcttgaatccttgttctctcctccgtttccgccatatcaagagcgtccgctctcaattttctctcgcgtgcttttgcttcgtcatagtgtgcaataggtagttacccacccctcatgaccaactccaacagcttcctggcaagcctggaactgcgtatcagcttccgactgcgcccgttccagtcgcagacattcaatcaactcattatctgtaaaagaaattggacagggtgccttcgcgctatggctcacctccgcctacttactaaacagagtaactagatctgctttcaatgttatattgtcaccgtcctatgggtcactagcgtgatggaaaagacgtcgtcgtaaagtactaatcaaggtattgtaataccctagattaatatctactatcattttgatacagagatagtcaagttaacgtctgcgtagagtttctacttactagaatttttctatatctatcatatcattgaaattattattcggtaaagttgggattcgtagtgattccgaaactttattactatagttttgtagactatcgggaatagtatattaaaggaataacagaagaattgtggtatactgccaattaattatccctttgatttctatattattagaaataaatatattatttggttaaagatcgggatattatatagtaggacgttggagggctagacagtctcgcggtataagataaggagtaatctagaggtaattttatagagctataatatgattaaagtaggactaagcttagtaactatatagctctcggtaaagacgctaaaagagttcaagagtccgcctaaatttcttaagatatacaatctcttttaaggtaccggtagtaaggaccgctagagaatctcgatcttcctaagtttaggacatctcttctgaaaagcttgatctaagggatacttacatagtccttatttaaccgatagattaagtcttttcctatactataatcgtagtgaagtatcagggctaatacagaagcgctgtatcgagtctaggcttagggtaatgattcggctgtctctatccggtaaatcgtcgcagtaatagaggcttctgtttactggaaattgtaagttaaatagacgagcctccaattgcacgaattttgtcactattgttcttctctcctgttcagacaaagcataccacacatcacctagggttttccttggacaagttccataaagatatatcctgtacctgcagaatggacttcgcttgcgaccacgagagatttaggcttagtaactgggtatggaattcgtgcgacaaatcggaagccgtctcgcatggtgatcagaaaatttcggttgaagcctccttcggcaagcttcaaaaaaccaacgacgtcgtccccattctgctgtatcgctagagcagtaaggcgcttccgtccagagacgttaaaaacacgtctcctctcacgatgtctcaacctgtcattgtagctagagttgcaaatcagcagagcagcttagtatggataagatgtaagtctgcaacatacatccatcgcccagacgtgtactcgaacaaatcataaggctcaggcattttccggattatcgagacaggacgtgcgagcaatatcattctagatgtgacgacgcgtgagaaaagaagaccagaaaactcacttcgatttagatgcttggtcatggcttgatcagttgaagaatatcctgaagactttggacagatggggctttatatcgtcgcgacccttgatgcgcttctgtcgcgtaggtacctaggtgtacgtaactagttagacctacctaactagttagttactccgtgactacggagtagttgtagttaattaactaatgcagtgggggtttccagagcaggatgactaagcggccctcctgaggcttagcgcatcatctctttaaatacggagtactggatatgtcattgatttggaaactacctcttcgtgatgcccccagggagctcgcactaggcaaccgtcttcgctaggctgttgggacaatatattcgtgccttctagtagtatcccgttgttgtgtggtcgggttaccccacaacgggccgcaccgaacagccacgccagattcactttagtcttcccagcggggattaacaccagacaatggaagcctagaggttcaatccatttatcattggaagccagaaaatggatccacaagttgaatgcttgatgatcaacgtacaagactcaagagacgaaggactcgggtgaaagcatttaacgcgcaattccatagttgaaacataattaggccatgcaggcagggtataccgcaagagctaagttatcaatttttagtacagtttccagatgtacacaaaggtggcaagagaaggacttcctataacatttgaattagtatgatattgacctatttagacggtaggcaaaatctgatatgacacactggtggttagagactgccgtaggccgcagttctaaccaacacttaatacatcgtctattatccgttttcagaagcattccctctccaaattataggcagtatctctagtaatctggagtgttcgaggtaggaacaaacatctagacttcggacgttcacggcgccgatccgaagatgagtcattaatgagtcagcatacctccgacttcaaccaatttgtttccaatgataagtgtccaaatatcgacgcgagtacaggccaggcgttcatctggtcatttataatcgacacaaaaacatcagtatcaaaacaagcgcttccatcgaacccggttgaactgcacatcaccactcagcatcccggtaggagccaccttcaacctagcctgcgaccgaatccaaaatggcacacggtgcggaggactgcgcaactgttctggagcagtttgtccacgatgtggcaaatctcccggctgagctcaaccacctcatggaggaaattcaggctaaagacaagcttatgcaggaatgccgcgctacaatcaactcgcgcgacagcagcattcagaagttcatcaaactgaacggcagtctaacaccgaacccaaaggaagagccatacagcaagactattctgcaaaatatggataaatcacacgagctgcagaacgagaagatccagcttagcgagaaggcatgcgtcctccttgatcgccagatcaaacgactcgacgtgcgcattcgcgatctagtcaacgaaggtctcctcaccaacgacccgcctctcccttccctcttcgactccaaaaacaaataccgcaacccacccaaaatcttcctccctgactccaccccctccgactccaccgcgtactcaacacccctcaacccaacttccggaaacgcgaatgccatcctggctgctgcgcagcgcttgaaccaatccacagcacctcgtgtcaccggctccgcagcgcagctcggacaaaccacagcacgcagctctgcacccgccacacccgctgctgctgctgtcgtgcaccttcagcaacgccaacgcgaatcctccgccggcgcagtggacagcaagcgccgccgcttgaacccatccctcaacacccttcccgtagcctcgtcgaaccttcgccagtcctccatgggccctggtacaccgaagccgggcacaccggctggcagccgtgcaggcagtgccggccctcgtgctagcatgggcatcaagaaggcattaaccaaaaaggtcgcaccgcaccatcaagtaaagaagctgaagactgccagcggaaagccgatcaagcgctcttctagtgctagtggtcgtatcaaggcttcgaagaaatctcccaatggggagggcgatgaggatgatgactccatgctcagcactgccgatacatcggactccgacaagagtgacggtgctgctgatgaggatgtcgatgatgaggacgaggatgagggtaatgaggattcgaaggtctattgtacctgtcgcactgttagtcatggggatatggtggcttgcgacaatgatgagtgtccctatgagtggttccactggaagtgtgttggcttgacgcgcgagccggttgggacttggtactgtgacgagtgcagacgtactctaggcaagtgatcctgttctttttctatgatctgtatgacggtttatatacccatggcgtttctgtacttgttgggatggactggacaaagatatgtacttcttaccaattttactgcatgatttaaatctgcttcgaaggaatcaatttcatattctgcccattctagacaaaaattgatactaatccctaagggaaaaggatgacaagaagcagaaatcccaccctaggtatccattcccagctatagccaagcgtatgtccaagccgtgcccatccagcgcccaatatatccccagggtcacagggagccggagcctaaccaaatcaagtcgaaaacgccatcgctatgcacatgtcccctttttttttgtttcttccatgcaaacatgttggcacacaggcgcacacagtgcgccgaaagtcagaaattagatattcgtggaaaagccattgctcgccaatccactcaaaacccaagcccattgttcagccacggatcgaagtactcgcaggtctcggggcttaccgcgccgcctggcgcgcacaaccggaacactgggcactggccgcaaggggcttctgtcatgccgttcttcacgaggtgcttgtttgcaacggagagatcgtcgccctcgatgggcggcttgcgggactggttcgcttttacggcgtcggggcttttgagagatctataccactcgccgttgcctaatgcgacgagcttgttgtcgtaacagagcatttcgaggagttgcacaacgctctcttcgcccaggcggacaggcgtgatgccgctttcgttgactgccgaggcgatctgcgccacggtcgggtatcccgcgtagccgtgggggtatgggaggtaggttttctcatcggtcttgacgtccaccttgccagaggcggttttgatgcgcttcttacggtctgaggcggggacttcgtaccagcttttccggctcacggtgtactcgatgtaccctgcgacgctgttgatgaagttggcgtccagtacaccgtccgtaaaccaggctcctccggttacctcttcacttggagcaagcccggccaacatgtacatcttgcggctggggtatttcacattgtggagagatttgatgtagttttttccttcgagggatttcaggcatcgatcgaggatcgacttgtgcaggttcgtgcggtttccaatgtgccgcacccagatgcctgttcgttctgtggagtggatgacattgtagaccatggcctcgtccggggtaaggttgcggagcctggagaggaggaggggttagttatgtgctttatcgactgagatgtgtctgcaattcctacttctcggcatcctcgcggtcaatgagcttccatgtgagctttccatctttttggaggaggcgaaacagattttgattgacgaggctctgggtgcattctagcagtagcgcaacgtcgttctttgggatcactttgagattgaggaagtcgttctgatagaacaagtgatcggggtcaaactcattcacgcatgcatcatagagctttgaggcaagctcggccacttgggaccccgcggaggccattgttggagatgcgacggagatatcaggcaaaatcaaggttcattcgaagaggctcgtgggttttcatgttcaaggaagtgtgctagagccagggagtaagttagaggaccatggtgcgtcgatgtcggcaaatttgagtcacaaaagaatcacaaatggtgttttttttggcgactttttctcggcggggaccgactttgacccaaaagggtttagccccgtgaagcttcaagtgtcagcgtccgtgcctgaggcttaataattcctgcctgaggcagtagatagcaacggaaatttcgagaagctccggccgttgagctcatgacctcagcactttcagttccttgtgatcttatttttgatctgcatttctcccttttctgagcaatttagcatatcactacaaaatggctgacgctttgaaggcagaaggcaacaaggccttttctgctaaggactatcctactgctatgtacgcgctaccccacctttaacactgtgacttcgtcaaagcagaaactgataaaaccagtgagaaattctctgaggcccttgctatcgaacccgaaaaccacatcctctactccaaccgctctgccgtctactccgcccagcacgaatatcaaaaagccctcgaagatgccgagaaggcgatcgagatcaagcccgattggtccaagggccatgcccgcaagggtgctgcgtaccgcggcctcggagatctgtgtacgttattctagttgtgcccgaattggtgggataattggcattgtgacaaggtgctaactgatggcagtggctgcgcatgatgcctatgacgaggccctgaagatcgagcccggcaacgcacaggccaagtccggtatggaggcgacccagcgcgccatcaatgcggaggctaccgcagatggtgtcagtggtgacccaacaggaggtctcggtggaatgttcaacgacccggctctgttccagaagttggccaacaaccccaagaccgccgccctgctgggagatgccgagttcatggctaagctgcagaagatccaacagaaccctaacagtgtcggagaggaaatccgcgacccgcgcttccttcaggttatgagtgtgcttctcggtattgatatgaacttcggtggcgagggagcggagcctcctattccttctgctaaacccagcacctcgcagtccaagaaggagcccaccccggagcctgagccagtagacgaggaggcaatcgccaagaagcaggccaaggaggctgctgatgctgagaagaagattggtaacgatttctacaagaagaagcagttcgatgaggccattgagcactataccaaggcttgggacttattcaaggatatcacctacctgaacaacattggtgctgccaagttcgagaaggccgattaccaaggcgcaatcgagatctgccaaaaggctaccgaagagggccgcgacttgcgtgccgacttcacgctgatggccaaggcctacacccgaattggttctgcacacgagaagctgggcgacctcgcgcaggccatcgaattctacaacaagtcgctcatggagcaccgcacccctgataccctgaccaagctccgtaacgccgagaagaccaagatcacgaccgagaggaacgcttacattgaccccgccgaggccgagaaggctcgcgagcttggccagcagaagttccaggaaggcgactggcccggtgccgttgacgctttcaccgagatgaccaagcgtgctcccaacgacccccgcggttactctaaccgtgccgcagccctcatcaagctcatggcattccccggtgccgtgcaggactgcgacgaggccattaagcgcgatgccaaattcatccgcgcgtacatgcgtaaaggcgctgcccttatcgccatgaaggaatacaaccgtgccctagacaccttcaccgaggccgccgaccacgacgacggcaagcacgctcgcgagatcgagcagcagcagcagaagtgcctggacgcccagttcagcgctcgcgctggtgagaccgaggagcagaccatggctcgtatccaaaatgaccccgacgtaagatctaatttcccctgcaccggattattcagcatgaagtttactcacattttctccagatcatggccgtcctccaggaccccgttatgcagagcattctccagcaggctaagagcgaccccgctgccctgcaggagcacatgaagaactcgcaggtacggatgaagatccagaagctgatggctgctggcgttatccgcatggggcggtaaatgctataagggtgtagagcattcgagggatttgaatacgaattgacacgatatatttttgccagcatatttcttagtttctaaaattccattctgcttatatgcatttaatcttctagagtagtagccagccagtagtgatgcttcctgtaattactgcaaatacaaggttgtatgaacgagtcctcgcgaaacatgtatcctctcagtcggcattgtacggagtactccgcacgatatatatcagccacaatatatagtagcagacaccagccccaacatacagacaccagccccaacatacagacaccagccccaacatacagacaccagccccgacattaatatacaattcttataaaacctcggcctcagctcgggcccgtggtcttcatctggcagttctcaagccgaaaaaatgaaaaaaagacaaaaaagacaaaaaagcgccacacaagtgggcgagtgggggttcccaattagagaaccacaagatctaaccgaactactttatctaccaatcataacatgaccattgaaggattcactctcttcgtttgtgttatatattgttgcacagacacagaatatacccgatacacacagctgggagtggaaatagcccctcaggaccaaatgcaagtctagatgtgatatgatagatcaattcggcgtgcagcacttggcttgtctatcgctgagtatttaggttgtataatcgtacaatatacgtactccatcgaggttcctcggtaaagaatacccattctccatatccaaggaacacctttggtggatacacagagtagacttggccgatctacctaatcgggattagggcacgatgcgaggtcgatagcgtgcgatgtgaccaagtttttcattacattctctggatgcatgccacgtgtaccttaagagctgagagtgttctaggtgaagtacgtagacaatgacgacatgccatatacatatactagttagtataagatgcccctatattgtactccgtacgggctgcatatcttgttgcctagacaggtaaggtagggctagatcgatagcctacaaagtacaaagtactagatccgcaaataaaaaaggggcattgaacccaggagatgcccggagtgccctagagccctaagaataactagaatccatggaaatcggagtttatcccctccattgaccctctactgaccctctacggagtattgctgaccctctattgaccctctgtggctgtgctgaaagctcggagtttagcctgtcattcccctgacctcctcaattgacggattttgattgtactagacaattgaaccggtacggatatagtcttgtagaataacctcatagactcatactccgtagactcagatgtgttgtatctgctctctatatgctaaagtgaggaatctgacccagctccgacgtacgtcactgatcttcgatcgacctcggtgttcgcgatctccgatctccccttttcgctctcttttctttctttttattgggctttcaattctcggaattaataatttacctaaagatatacataaggtatttaatagaaatatccattggcgtatcgtaaagaattccagccacagttccccttgacgcaagcggctgggcaacttgagctgtgcctttggtcccactcctctcctcttccaaggttctcttgtttttctctttctcactctctcgatcactctgtaccctggtatacaatagcataccaggccacctcttcgactacgacctcacgcaatcccggtacgttaattggtagacctgcgcaagtcagcagtcagcattcttcccctcaccccaggttccgctgaatccaatctgaccaccctctagaatatccccggctctctcaattccccccgaccagaacacagcaccaaccggcgatatggcgtccgccgacgcggctaagacggatatgaggatggagggtaccatcgaggccgcccaggaattgcaaaaggacccggaatcacaggttaacccggatgtcgttgagaaaatggcggtcgacgaagcccaaaaggctggctcggctgcataccaattcgaccccgatgccacgccagaagacaaggccaatgctgctaaagcggtatgtgtcgcaaaaagtccgagttgtgttcggcacaatcaccttgctaactggcatttcgtctagcgattgccgcctaattttcaccatccccatcaagccaccggtgttgctgtcctgacggataaggtgaggataactggttttcgcgatgcgctttcaatctacatcctaaccctacttagaccgacggcaaagcagactatgatcttcctccaccggaatccgcgaccgccattttggccgaggaagccacacgagaagatgcgggtgagaagcccgtcgatgaggatcttcggtgggcgcgcgacagaacgggttgggccccaaagttcgtcgatgagaagctcgcggcgattttggccgaggaaggcacattgctggatcacgagacatttttggagggaagaatccctgataagttctttggcgactggtatcataattgcgggattatcatcttcgcctgcctggcctcatggattgtcgctgttctaggcggtggtataggctgggttcttatggtcatggcagcatgcagcacctactaccgtacctccattcgacgagtgcgccgaaacttccgtgacgatatcagccgtgaaatgtccaagcagcgtctcgagactgacaccgagagcctcgagtggatcaacagcttcctcgtcaagttctggcctatctacgcccccgttttgtgcgacactattatcaacaccgtcgaccaggtcctcagtacttctactcctgccttcttagatagcttgcgcctcaaaaccttcattctcggtaccaagcctcctcgcctggagcacgtcaagacctaccccaagactgacccggataccgtcatcatggactggaaattcagcttcactccgaacgacattacggatctgacttcgcgccaaacaaaggacaagatcaaccccaaggtcgtgttggaggttcgtgtcggcaagggtgtcgtgagcaaaggcctcgacgtgattgtccaggacatggcttgcacgggcttgatgcgtgttaaagtcaagcttcagattccattcccccacatcgagcgtgtggacgtctgcttcctggacaagcccgaaatcgattacgtctgcaagcccctcggtggtgatcaccttggattcgatatcaacttcattcccggtctggagtcctttatcaaagaccagattcacgccaacttgcagcccatgatgtacgatccgaacgtgttcccgattgaaattgctaagatgcttgctggaaaccctgttgaccaggctatcggtgtggtcgccattactctgcacggtgctcaacagctcaagaacccggataagttctctggcactcctgatccatacgccgtggtgtctttgaacaaccgtactgagctcggccgcacgaagaccatccacgacaccgacagcccccgctggaatgagaccatttacgtgatcattacctccttctctgatgccttgtctattgctgcgtatgactggaacgagtaccgcaaagataaggaaatgggtgttgctagcttcgcattggacaaacttgagcaggagcctattcaggaggggatctatctggaagtgcaggccagtggccgccaccgtggtgctattcaagccgatatccgcttcttccccgtcctcgagggacgaaagaatgaggctggagaggatgaacctgcccccgaagtcaacaccggtatcgctcagttcaccgtggagcaggccaaggaccttgacggaagcaagagtctggttggaaagctgaacccttacggtgtcctgcttctcaacggaaaggagattcacattacgaaaaagctcaagcgtaccaacaaccccatcttccagaatgcttccaaggagttcctcgtcacagaccgaaagaatgctcgtttgggtcttatcctcaaggacgatcgcgatatcatgcaggatcccattatcggccgctaccagatcaagatgaacgacatgctgaagatgatggagcgtggccagcaatggttccatctccacggtgccaaggagggacgcgtcaagttgactctccactggaagcccgtcgagctggggggcattggcagcgctggctacattgaccccattggtgtcatgcgcttccacttcaagcgtgcgactaacctgcgcaacttggaagctatgggcaagtctgacccctacgttcgcgtgctgctttccggtgtgactcgcggccgcacagtcaccttccgcaacaacctcaaccccgaatgggacgagattgtctacgtgcctattcgcagctcacgcgagaaggtgactgtggaggtcatggacgaggagactatcaacaaggaccgaactcttggttggtgtgaactcaatgcatccgactttgttcgcgaggcggagagcggtggatatgaaatcgacgacgagaagcaggatatcaccagcggtctcaagatcagcggcggctctcccaagggagaaatcgtctacaatgtctcgttcttcccgtctgtgccagtcgtcaaccccgaggacgaagctgaggaggaagaagaatccactgagcttcctgctactcctggtccggactccaccgaattcccgaagaaggctttgcactcgaagtctgctagcgttgactcgaaggcctcgaaggcctcaaaggctgtgtctaacagcgctgcacccgtaactaacggaactaccaatggcgagcccgctactaacgggcgcaccagtctcgaaaccactacatcccgcccactcacaagtagccagtctgaaaccgcgtctgttcggtcggttaaatccattccccgcacttttgtctctgcggaggatctcccgaaatatggtatgttttgcttcgatattcacgggaatagtacaaagctaattgaccatagaatccggtttcattgtgttcaagttcctcgagggcaagctggccgttccccatgtccagttggaagtattgatggacgattacatgttcccttcatatgtctcatccaagatccatacaacgaccgcacagttcaccgacgtcggcgaggcattcgttcgcgaactcgaattctccaagattacgttgcggctcgtcaacaaggaggatcccaaggactccagcgaggagcacacagtcgccaagctgactggtgacacactgcccacactgatgcgcatgctgtacacgcccaccgagcttatcctccgctccaactccggcgaggtgagcaaggtcaccgtcagcgcccgatacattccgacggaaatgaagctcgacccaacggagagcatcaacaacatgggcaccctgcgcgttgacgtccacgatgccgctgaactacccgccgccgaccgcaacggattcagcgacccattctgcaagttccgcctggacgacgagaccgtgttcaagaccaaagtccagaagaagaccctgcatccagcctggaacgagtacttcgaaacccccatcaaatctcgcatcggcgcaaacttccacgtggatgtgtacgactgggactttggtgataaggccgacttccttggtgctacggcaatcgacctggaatccttggagcctttccaagcgaaggaagtgactctgcccctcgacggcaaatcaggcgcaatccgcctgagcctgctcttcaaacctacctacgtgatccgcgcccgccaaggctcctctaccttctccggcaccttcgccgtccccggaaagatcgtcggtgcgcccgttaaaggtgttggtttcgtcggtggcaacgtcgtccgcggcgcctcattcctaaagcacggcctgatgtcgcgcatccacaaggagaaaggcgaagacaccgcctccattatgaacagcatcgaggaacctgactccgtcaggggcgagcggttgaccccagccgcctccctcgccgaagtctcctcttcccccgccaccccgcagaaggaacacagccgcaaccgcagcaccgcctcgcagttcggcgatcgcctcagcgtcttcggtgggggcggctccggtgaaaagggcaccgccaacatcactgtcgtttccgctgctaacttccccaacgactccaatctccgcgtcatcatccgtctccagggttccaagggcgccaaggatgtccacaaaacgaaggctcacaagaacccctctggctcagtcacctacgacgactctttccgcgtccccaacaccaccgccgacgcccagtaccaggttcgtgtcgtcaaccatgccacgttcggctcggacgatgtcctcggcgaagcgccgttcttcgttgacgatcagggttccgtcgccggccaggataaggttattaccgttggtgacggtgtcgttaccattcgctccagctttgcgcttgcagatggtggcttgagacctactacgtcacactcgaccggaccccccgatgtcagtgatggtggagggagtcctgattcgaaaaagacgccccgtcgcagcttcttgagtaagagggctgttagcggtgtctaaatcactcctttactcttattatccgctttggaattcctttgcctgttcatggtgaagagtatatgaaaatatgaattgtttccgcatgttactaattgtgttttgtttgtgcttgttgtgatatccttttcttctcgtttttttcccactcctatcaatatgaattcaattgttgagatggccccggactccttgagacatctaccacgtagtataaaataggcgagtaaaaatagttgagaatcaatagtttgcgccacacaaaaagaccgagaacaagactgagtctgagacctgagactgagtctaagacctgagacatcagtctcaggttggtatcttaaaggggcttccgataaggatatactcgtatttcatgtggtatgcccattgcattctcatggccttatattaaactaagattggtctaaggccttctctgcatcccgagtataatttcccgaacttggtctgcacagcctggatgatctgcactttgatgcttcggcctcttggagtgtttagtgtacccgtaccgtagttagtatgttgtactatgttgtagtgtagtgtagatatagatggtagtggtagggatcgggaatactacataaagatgtctgatattcagcattttatttttagatccagacggagtacggagtatattaacctcatttatttagaagaggcgttgtggagtcgataatttaccgtcccacttgcagttgccactttgactggaagttggtttgcaacatacaatataggaaatactacaacatatgggatgcaattagtactagtctagatgaatttgaatctatatttgctgtactctgtagtaggaattgtgataatagggatccaaggtgaaaattctacctgcattctgtgctttgtactacagacttagcgatattgtatattgtcatataggtcaggtgaacatcatcccgactatgcatctatattctatcttggaatagcacataattaggcgaatcggccgaggtttgttcgaaacaattgaaactgaaacaaaaaaggagaagagcttgtatccggtggggcttgttcctatttgtagggactagctctcctctaaggtggggagggaaaaggggtctggattgttagtggacttgtgtactccgggcttaggggtatagtggatgatgaatggttctgatggcaatcctgtctaactgacacttcctacgcgtaggcttaatagcaacgtgcatgtcggtgctggttcccgagctccagcccgtgggcatgtcagtggctggcaactgacgacatcgggatgtaaggaggactgagcgagataagagaataggaatgggggatgacagtctctagagactctggaggaagagacacagtaggcacagtaggaagaacagagaatgcaggagacgatccgcagattatttatggatgttggcatataaagtggacgtaaatacccaaatcggtgcaaataacaaatacattctagaaatcacggggtctctctcccccactccatctcccttttcttccctctctctttcgtttataacctctggacatcccctctcctccccctcttcatttctgtccttaggaattgatctgtgagttgtcctccatccccgcccaatgacggcagcttgacatccaatggatcgacaaagtggcgaaccccctcctttctgaggcagcttgagttgagcttcttaaatggagccacgttgcccttttcttccttgaatctaccactgaccgtcgatttcctttcacatagccagtttcctccgagtccatacccatatctcataaaccataactcataatggcctctaaggctcttcccactcaccttcgagcccctgtcgaaagcgagggctttggtggaaagcaccatggcaagtcgcagtcgcacatggtaagttctcttcaggcggtgaacccttgaatctccgcatcctgaagcttcgttcttgcctttttggattgttcctgccgtttttgggttgttttgctgcgctttcctgcgctttcctggacgcgtcttgacgaggccacaacatcttcctcttttgctcgtttcctcttctcttcccctcttttcttccctttctcatccatcgctacactgttatcattgctcgattgcttgtattttgagaagccccattcaattgtctctatctatccctttccttatcatggctactttggcccccccatttggtccagagctgacgcgtgaaacctccaaccaggcatttgagaatgcctccactagtgtcgccgcctcgcaaatgcgcaatgccctgaacgccctcggcgacagcgtcaccgaccccaaggagaagaagcgtttcgaagccgagatggacaactttttcgccctgttccgccgtttccttaacgacaaggccaagggaacatccgtcaactgggataagatcgcccctcctcagccttcccaggtggttggctacgatgacctcggtgcggacgcctccgtagagttcctgaacaagctggctgttgtcaagctgaacggtggtcttggtacctccatgggttgcgttggtcccaagtccgtcattgaggtccgtgagggcatgtccttcctcgatctttccgtgcgccagatcgagcaccttaaccgtaccttcaacgttaacgtgcccttcgtcctgatgaactccttcaacaccgatcaggacacccagtccattatcaagaagtacgagggccacaacgtcgacatcatcaccttcaaccagtcgcgctacccccgcatcatcaaggactcgctcctgcccgcccccaagagcttcgactctcccctccaggattggtaccctcccggacacggtgacgttttcgagtccctgtacaactccggaactctcgacaagctgattgagcgtggtatcgagtacatcttcctgtcgaacgccgacaacctcggtgccgtggttgatctccgtatcctgcagcacatggttgactccaaagccgagtacatcatggagttgactgacaagaccaaggctgacgtcaagggcggtaccattattgattccgacggaaaggtccgtctactcgagattgctcaggtgcccaaggagcacgtcaacgagttcaaatccatcaagaagttcaagtacttcaacaccaacaacatctggctgaacgtccaggccatcaagcgtgtcgttgaggagaacgagttggagatggagatcatccctaacgagaaatccattcccgccgataagaagggtgaggccgatcaggctatctaccagctggagaccgccgtcggtgcggccatccgccacttccacaacgcccacggtgtcaacgtgccccgtcgccgcttcttgcccgtcaagacctgctccgatctgctggtcgtcaagtctgacctgtaccgtctcgagcacggccagttggtcatggaccccaaccgcttcggtggtgtccctgtcatcaagctcggttccgacttcaagaaggtctccgacttccagaagcgcattaccagcattcctcgtatcgtcgagctggaccacctcactattaccggaccggttaacctcggccgcaacgtcaccctcaagggaactgttatcattgtcgcctccgagggcagcaccattgacattccccctggatccgtgcttgagaactgcgttgtgcagggtagcctgagaatcctcgagcactagatgttgtcgtctgattcttgtgtcttgcctggtttgcaaacccgtcgcagtctttggtttttctcgttttaacggtgcatccgaggctatggattccacggagtattcaaaggaagtacttgtattacattacaataatccagcgtcttttttctttcttttctattgggttgtttttagtctagacctgactttgattcccaagtactgtgactgttgctccgggccattctcaatgcaccaatacaagcttgttcatctgcaaaagatctctacatgtatgtagataatgtagttgtaattgtatgcctacgcctcggtacttttatccgctatcaattcgatatatggccccaagtagaacacctacacctcatttagcctcgatatcacgaaacccagcttcgaatccgtgcaagacactgcaaacatgaaatcgccattgccttcaggcaaatgaacacctatcataataggcgggggaaagttccccatgatatactcccaacgtcattcgccgcagaataagccctactaaaccgtatcaaagcagagggggatctcaagtaaatcgtcctaccatcattcgaaacaggaatatactttgcaacaatatgcattcctgatcttgtacagtgtcaacattgtttatttgtatattgccaacagtacatatttgactgtatatctgacgcctttttatatattgtttttttttttttttgacatacgcttcttcacatattggacaaatatcctttatatatttgcatcttatatgctacattttacgctcgaaagaaacgcaaacgcaaaaggaaaagcacaccgatatccacctgctcatgtcggtatgagtgggcatcatcgccgtcttgtacccggtccctcgcctgaggaggaggaacatgaccacgacaactaccatgaaaatgatcttgaaaatggcagtccactcaccgaggaaggtaagggttctggtacgtggaagaagagagtttcgactgcgtgtctggcttgtaagaagtcgaagaggaaggtgagatatatgatacactactctacactacatctacacatatggatataacaaccaactaacactctaacgcagtgctccggcacatccccctgcgcaaactgccaaaccttcaaaagagtctgcatcttcgacgaatctctcgaccaacgccgacgcgtagccgcaaaacgcacagcagacgagctctcctaccaccgcgacctcctctccgacctcttcaagctcgtccgcgaagcaaacgaagctgacgccctccatctcctaacgataatccgccacaatgcccccgccgatgaaatccgcgcctacataaacgaaacactcgcctcgatcacgtcaaccactgatacatcaacatccacggcgcacaagcaggaaaccgtcgcgaagctggaggatatgcgccagcttctcaatgtcgagggtacgggtcccactttcagaaggaaggttatggatatccattacctgtgtgactcggcgccttgtgaagtgcctgcggcgccgtggacgagggttactgctgatgcggatctggtgtcgcatcttgtttcgttgtattttgcgtgggattggccgtttgcggctattttggacaaggaggtttttgttaggcatatggcgaagggggtattggggtcggagttttgtagcccgtttttggttaatgcggtgctcagtaatgcttgtgtgggtatttcctttttcactttcttttgctttgaggtttgctaatattcggttgctgatctgtttgtttagtacttctctgagttctccgaggcttatgttgttcctggcgatatctcttcaaaagggagtggttttcttgccgaggcagagaggttgagaggcgaagagaattcgcagcctagtttggcaggtttacaggggacgttgttgatgtatgagaggtttgtatagacatcttgtcctagtggctagggcttttctgacaaagatagatatgcaatgtcccgcgaagacgatctgggctatatcatgctgcaccaggctatccaaatgggcgaggcactgggtctggtcggcagcacaggacctagaatagcttcggcggagttatcccaagacatggatatctcatgcaagcgcacagcttggggtttgttcaacgtcgacacgtgagtgaatactgctagcatcccacccttcgaactcacactcacacctgcagcatggtccacacatccttcctgcgcccaagtctcatcgatcacgtcaacatggcccgtctggatatcaaccagcccgaagacaaagccctctggcagccatacccaacccatcgcgacccgcgcctgtcattcttcagtcagtacttcgacgaagcatgcaacctgtcaacgatcgcacgcgatatctcccgcaacatgttcgcagaccacaggagcaagactggcctcggccctatccaccgccagagccgcgaggatctgtacgaccgtatccgtcgttggcacgatcttctcccggaggactttgatgtgcggtataggccggctccgcatattatcttgttgaagtgagtagcatgtccacattaatccgtcttgtctaccgaaaaaaaaaagcaaaaatactcatcctacacagaatgcgctaccacgccctcatcataaatctcttcagctgcatttccgaagatgaagtcccgcccacacccttcgagcccaaaacaccggaaagcccgccgcgccatactcccgagagaaaatataacgcgcgggaagtaacgcagagcgcggcccgcggcatcgctgccctaacgcgtctccacagacgtgagttcggggttagccgcgcgcaccagtttgcgatgtatgcgatcaacctggcgctgtttacgctgctcgagcaagactcgtttgatgtgctggatgaggatttcctcattctttcgagtgcattctcggttgttgcgagtcgatccgcgctggggaggaatctgtttcatattttccgacagtcggtcagggcgaaggcgcagggctatcgtattcgggagagttctgtgcctgatgagttgaaggatttgtttgacgaggcctcgaaggaaagggggtgtgatcgatttgatgagtatgctgatggacttgagaagttaaatcagaaggaaaagtatcatgggattggagatgggaatggtaaagggttgcaggattatcctggacttggactttccgatatgttggatcgatatgagagtctgagtcttgggaaggatgatgttctggttgagaggtatcgacctgttggatgttgatgggagaccgcacgatgcactatcctcggcatcctcgtcatctcggtcgtatgtctccaggcacatttgccttcacagagtggcgacacggttgtatgaatttgctccatagatatagatcgtccagataagttgataagttcagggggatgtataagctgacaccaaggaggaacaccatagaatgcgacagttaccgacacgtcacagctaattatggagtctcagatccccaagagttcataggtaggagttggttgacttggaggttggctgaggttgggatgttgtctgacgtcaaatcggcagttcatccacccgccaagtgaatgtcatctccacgctcgtccactttagtccaacttcgccccagttgagatatttgacagttaaaacattggaaacaaatcatcaatccttgttttcctgtttgtgctggaatgtttttgccatggctttgttccgcctttcttaccttgtaccctccctcttcaaccctcggtaacatatattcgtgtcaataatctcgataaatttgataaatttgatatggataatcatgacctaactctcgaggactacgtctcgatgtcatccgtacctggttatatacttccacaaccctatcctacgcctatccctttctcgccaatacaataccctgcacaagccttctcacagcatatgtcaaccccgtcagcatccggaagtactgctccaaaggtagccattcctagactgacgggttctgatacctttatacacgggcgccgacgggcagcgcgggcctgtcagccctgtcgccagcgcaagatcaaatgtgatggtatccgcccgtcgtgcggacaatgtgcatatcacaattacggctgcaactacgaggaagtcaaacgagtgcgggatcagaaacaactaggctccttggccaagcgagtggatacatatgaagctcttctgagagacctcgaagccgaggtggacccccccacagctcgaaaaatcaaaaaagcattgaaggtatgtccagtcaatatcagatgaagttgcgggtctcacccaagactcggatcttatgatttgagtcccgagttcacgactctgaccgtttgccatttggcaaattaagtccaaaggtgtgaaaacccctagaaagagtttcgactccgatgattcctctacctctatggactcactcgatgctatcgaccaggctgacgaagacctcgatcggaacgcggacacccgggctgcgggcttctttgggaagaattcagaggtcaattggattcgcaagctggagagcggcgtggatatgaagagcgcacaggaacatgtggcgaatcattctcaaacgcaaagtgatcgtgatccagcctttatgcagcagcaacagtcattggaaaggcagattcccacttctacgatggattatcatctcgacaatttggacattccgatgattgaaccatgtgacccattagctttgcccccgtcggcattggcagaccgatacttcgatgcctatctgaccaacgttcatccgacattcagcgcagttcggaagatgaccttcatctcccagtatcagaagtttttcaacaatgaatcgacaccacaccggaaatggctggccattctcaacatgatatttgctattggttgtcgctactctcgactcataaatgacccccaaagcactagtgaggaggacctgatatacctgacccgggcacgccatctcggtctgcagggcagtgtgctattcgagcccactgacctccagcagatccaactcgaactcctcatagcaatttacatgctttgtctgggacaggtcaaccggtaggttcaatcctttcaccctccattccttctgcatcatactaattccctcatctcccccagagcatccaaattctccaacatggccctccactcagctatatctctcggcatcaacctctgcataacagacgaccgcaccaaagaagccgccaaagaaactcgcggccgactctggtggtccatatactccctcgagcaccttcttgcatcaatgaacggccgggcctcctgtgtcggcgaaggcctctgctccgtccctgcacctcttccgtacgaagaagaaatattcgatcaatccgacgctaaacgcctcctccaagatccggccctccgcgaagcccaactccgctccaccattttcgaaagtcccagccaacaccactcgccctcattggtgacctcctgtctaccctgtccatccctcttcttcaacttccttgtcgacctaaccctcatcacccacgccctcatcaacaaagtctacagtatcaggggtctccgcaaaggcccgagccagttagaataccacgtccaaaaatccagcctacaaatggaccgctggctctcaaaactttcccccttctacgaattcaccattccaagctccgatccctggcacctaaagcacccccaactagacgacctctccgcgcccttcgtgcgcgaacgcgtctgtctagcaatgaactattactccgcccgaatcaccctttgcagaccatgtctaagccatatccaccaatctccccgccacgtctcaccaacaggcgatcacgctgcgcgcgaaaaagcgcggtccgaaagggccacacactgtctgcaagcttcctgcgcactgatctccatcttcccagaagatccgaacattgcatggctggcccgcaccacgccctggtggagcattctgcatttcctcatgcaggcgactacggctatattgctgggtttgtcatgctgttctgactcaaatacgcccaccagcccggaccatgcggatccgctcctgacacctgttacgccgtctatatcccagaccggggcttactcgccgctgctggagaaggatttgactacggctgttgcggcgactaagaaggccctcgcttggcttcatatgactgcttctgtggatccgtcggcacgacgggcatttctgctttgtgatgggattgttagaaagattgcacctggcttggggattgatttgacggagtggccggatgggagttcttttgagaggttgatggaggagaaggagataagtggacatgggaattggaatgtagatagtagcggaagcaatgagcaccacagtgggagtgggatggaggcgtatgatgagttggttgatttcgacggaggtgttttttagtttagtttgagcgtgatgtcacttttatatctggatatacgatgagaatatgattgatgaacaaatgtctacacctaatatatccatatgccactttaagccgacgctagcaggcagtcattgagaggcgcatgttcaaagttttagcatcctggacggatgatgctagaatcgctcttaatatcaagtcacagtcacggagcgactatctggctagtaaggattgggaggcaaagaagcaaccggtaacttggtctgagaataaacggacctaagccaagtggattacgagcagcaggaccccaagcttgaacttgaggcacgggaatgacagtgctagtacggatgagattcagcgcagtcacttccatagcgaccttctcgtcggcatagtcattaagtgccatccccacacaaaggaaacgaaccatccaggtagtattatcgctaaagaccatcttcataccggcattgaatgcgccatggtgaaaggtaccgtcaagctggcagggaagcttatcaggatggaaagttgatacccattgacagagatgactcattctgtaggtttcattcaccctgtcaacccaaatctggccttgcacctcgtggacgatatcaataagcgcgtttgtatccatgacatcaagcaagtttgagggttgagacgagtacgagcaccggacaagtcaccgctaatttagcatgaaggaaatcatattaatccgtgttaatccgctttttgacattccatctgctcagagggtcttgtcgaatgtcgagatctctcatttacgctagttagttagttagttaacgtaatcggtaagcgagtggccactgtaagcgagtggccaccccacccaagaggatatgatcttatgccctgtctttccacacccactacaccttggtgcagcccgtggtcgtggttctaaccctgattgagtgcttccgcccggggggtgtaggggtatttctaatgcttccaccagcctagcaatgatttcagaagcttcttgaactgagaggccttcttcggcgggtatctgccgtctagatcgggcccgcttttgcttcttattctcattttcatcccgtaaatccttgttttctttcgctagtaaaatagcgctatgcattgcaagctcgcagcctttgataagttggtttaatgcacgtttagaagggcttattaggcttcgagattgggttcgaagtaaagctttaatagacaaagcctgtcgacgtagatctttgctattaaaaggggtttttggggtgaaattccggcttaaatcgctaccccggcttagggggggggttagcgttcgaagataaatattgagttttgaaagtacccgatcgggtaaaaaaggtattaaaccagctgctgagaagctatttttaatcgtctccgatttaaaagcttcaattcgtacagaggggtatacttcgaggaattcaagtttattaatatagttgatcccagtctgcattttcatctcaactaaccggctgtacgaccgttttaccaccgcaaaacaactgatatcgagaggttataaaaggtgagaggaatacagtggtatacaaattggtataatatcgttttccttataaatttaatcgaattaaggggttaaatggcttctgtagccattgagtactaaaagtcgataccttcctactatacgcaataaagttaatagtataaagagtttctaaagccagcgaagtccaatttcatctaatatccacctatttggactaacttcaaagcgccagttactaggaaggccttcgaaccataatttaaggaagaccttacctttaaaaataatatatagagggaggacctatcctaccgcgtttatacatttaattgcagttacctactcgcgatttctaggttgtaaaagtaatctccaactgtagtatttacttcttattataacctttgccgttatagttaatcctattataaatccagtctcatcgaagttataaatatcatctaggttaatcccaaattaaataatagttttttaaataagattaaactattctccaatgatttttaggtctttacacttcgcgcgcttataattataacatcttaagaaccgagaggaaagaagagggcgttgttttatgaaattgtaaacctatttttcgctaaccaaaatgactagggtagttccgcgctttttaagaagaagattcgccatttcttataccatagagggccggggagctgatccacgagaatccatagagagaatccatttttgaagagattcctcttcaattgtagtcaatttagtcgagttggcgcgagaagtcgcgcggcattgtattccatcgaggcggcgccgaagggttgaacgcgggacgttaaaggtacgggcggcaatagaaatattggtaaattcttgtttcttaaaagcctggatagctagtaagatcctaccctcctgctctattgaatctttagaggattgagagcgaattggtggcatggtgggtggttgaactaagtaagtgctaattcatggacgcgtttttgggtagggtggccacccgcttaccgtggccactcgctttccgannnnnnnnnnnnnnnnnnnnnnnnnnnnnnnnnnnnnnnnnnnnnnnnnnnnnnnnnnnnnnnnnnnnnnnnnnnnnnnnnnnnnnnnnnnnnnnnnnnnnnnnnnnnnnnnnnnnnnnnnnnnnnnnnnnnnnnnnnnnnnnnnnnnnnnnnnnnnnnnnnnnnnnnnnnnnnnnnnnnnnnnnnnnnnnnnnnnnnnnnnnnnnnnnnnnnnnnnnnnnnnnnnnnnnnnnnnnnnnnnnnnnnnnnnnnnnnnnnnnnnnnnnnnnnnnnnnnnnnnnnnnnnnnnnnnnnnnnnnnnnnnnnnnnnnnnnnnnnnnnnnnnnnnnnnnnnnnnnnnnnnnnnacctattttaataccgtaaaacagccgatattaagtagttataaaaggtaagaggaatacagtagtatataaattagtataatatcgttttccttataaatttaatcgaattgaggggttaaatggcttctatagctatcgagtactaaaagtcgatacctttctactatatataataaagttgatagtataaagagtttctaaagctagcgaagtccaatttcatctgatatctatctatttagactaactttaaagtgctagttactaggaaggccttcgaaccataatttaaggaagaccttacctttaaaaataatacacggagggaggacccatcccgccgcgtttatacattcaattgcagttacccactcgcgatttctaggttataaaagtgatctccgaccgtagtattcacttcttattataacctttaccgttacaattaatcccattgcaaatccggtcttatcgaagttataaatatcgtctgggtcaatcccaaattgaataatagttttttgaacaagattaaaccattctccaatgatttttgggtcttcacacttcgcgcgctcataattataacgtcttgagaaccgagaggaaagaagagggcgtcgttttataaaattgtaaacccatttttcgccaaccaaaatgactagggtagttccgcgcttttcaagaagaagattcgccatttcttataccatagagggccggggagctgatccacgagaatccatagagagaatccatttttgaagagattcctcttcaattgtagtcaatttagtcgagttggcgcgagaagtcgcgcggcattgtattccatcgaggcggcgccgaagggttgaacgcgggacgttaaaggtacgggcggcaatagaaatattggtaaattcttgtttcttaaaagcctggatagctagtaagatcctaccctcctgctctattgaatctttagaggattgagagcgaattggtggcatggtgggtggttgaactaagtaagtgctaattcatggacgcgtttttgggtagggtggccacccgcttaccgtggccactcgctttccgaatccatatggtggagaagaacgccgatttcacggagggtatcatagtcataagagacctggcttttcgattctagccattccaagatggagtcggccttttcttcgaacatttttctcagggcatcatggtcctgcagcataggcggattgacaggttgagaagacatgatagacggcgtggaaacgcgacgagattggttgacagtgttatgaaaatgatgaagagacgaagaaacgtggagatgtggagatagagaggtggaaagctggaaagctggagagctggaataagtctaggaactataatgcctctgggcggaaatgggttagtgtgtcaccgtgacccactctcacgtggaccacctaggcagcctgtttccagcttactcagcgtaccgtccacccgtggacccagctcaagggaccgggcttacagctgatcgaatgttagaatgggaccgctaatttagcgtgaaggaaaatatattaatccgtgttaatccgcgtttcgaccatctatctgctcagaggggtcttagcgaatgtcgagatctctctttacactaggatgtcttcatagcttataatagacgttcataaagaccccgtgatcattatttacagtattatctttaccactaaatcctatcttcttctgtactagtgtattataacccctgtcgatttttttaggcggattttcatactgtcctatcttatactctacatatatccagtataaagaaacctttctttaaccctccggcttttgcactttgcccaggacagctacctcaaccattcccagcacgttataaaggagcaccagagcggccaagaacactttcacctgaccattacactcatctttagagggagattaatcctaacactatacccccgctagggatcctcgctgatataaatataataataccacctaatatcttagcccaataggcggataatcaatcagaagattctaccgaagatctgaatctcctagtacaagatactacaaataccctcgaggctccctagacccccttggtcacagctgagccactatggttactatataggagcctcgagtgtatttgtagtatgtcgtactaggagatcaagatcttcggtagatacagaattatccggaagcggtggacagcaggcactaaggcggtgtacagaccatccattgagagaatcagtacggagtagcatgaacaaaagaaaagaaatcaacaatgtctcttctatacagtctgtgaagcgagcggagtactccctgaacaagggggctattcccactattcatggctattattgtatgcacctaaccgtgtagaggttaaacaaggctagttgtgcacacttgacaaaatgacagctgagtccgagcaccgggggaatacaacttgagtgagtgattgagctgcatcatacggagtacagaatacatacacacttgtctacggggaaagacacctgctaattggctataccctatataagatttacaggggctggggtcggtggctacctgactgcccaaggccaggcctgccccaccgttccttgctacatagatattattcaatgcctgcatgaccttcgccattcttgaagtgtttgccaatttttaggtaattacaaggcgtgaactagatctccgttaagcgattcggcaaacttggcccaaattgccatgtgatatagagagtactagatatctcgtatacgggatcttcggtcacatcatccacagctctttgctttttcctatagctggtgttgatctgtctctgaactcagctcgccactgctcatgggtatggtagtgcatagtgatcacccttcacttagttttacgttatcataatttgtgaaatctatagatggccagttttctagaagtcaatgaccaaccccagtggtagctatgcactgtgacacatggggaaccccagctgcatgatcttcttgcgcagatacacacagtgccaaaactttcgtgacctgcttagtcgataaaagtgagacacgcaagaatgaacgaagaaatagagctgacgagtatagcccgagttatggggagctgaagaaaagatgtgcagctgaatgagccaataaacatgcacagtgacaaaacgaagacatcgggattcgacctacttagagttgcacagcagaaaaggaaaggaaagtgtgcatgtattgtcgatcatattatatacggagaactccgtgtagaatacagctgcatctaatttaaaccatatgcatgatgcacgaaaaagaaatccacatgaaggcaagagaagctgaacccttgtaatactccccctatttgaactccgtatatttacttgaataggacctatttatttggccttggaacgccttctacagatatccttcttctattcatcatccttcatcatggtgccctcaatcactaggctcgaacatgtgtcttctatcatacctatcaacaccttgaagctacccaagaaagctccctctcacacacaagactccgtcgatcttcctcttactctttgcgaatcgcatatactcgaggctgccaactcccagtacttggaatacctggatccagaactagctcggggtcttgacattgagtcaattctcgttgtttgctggttacttgtggtacatggtttctctcctgtgagaaccatgtacctagagttccatcctggctcaaatctgtgctatatagatggcaaatgtcaagggactgattcgcacgctcttggattttccgtggagcgtccattgaaggacctcgttcgagacttctgtcttatcaaggcaggcatcaactcgggcgaccctgatgaagggtgggcttccgatgataagaatcaccttctcacctcggctgtccgctatggtggtgaccgtccaaatttggaaaaggcacctttgtctgccaattcaaaggtaccgtttccatatcctcactcaatccccccgtaccctagcaaagctaatctcatctcggtctagatccccaatccaaagctgatgctcaacgtgacaaatgacaatggcaagctgcacgcaagtcttgccttctcgtcgcccgagatgtcgaaagaattcgcaacaagccttcttcactccttgaacaaggtcgtcgcatccatataccattcacccgaaacttctttgggcgaccttgatctatgctccgaccttgacctcattctcctgcaaaagtttacgagggaggtttcggactctcatgagatcttgttacatgacatggcattggagcatgcgcgactgaccccggatgcgcccgcaatctgttcctgggatggaaacttcacctatagagagttggataacctcacatctcgtcttgctctttacttgaccgggcttggcgttggccctgaaattttcgtgcttagttgtttcgaaaagtcatctttggcgattatcgctcgcctggctatattgaaggccggcggggcatacatatccatcgacgccagcgaccctcccatattcctggactcggttatcagtcgcgttaatgctaaaatcatgctcacatcctcggagtatgcatcaaaatatgcctcacttgtctcaaacgtcatctcgattacagaagacatgctgaaagagcttcccacaggacctctggcttccacagtccaacctcataatgcctgtctggttttgttcacctctggaagcacaggacagcctaagggcattatccaagaacatcggtcttacgccacagcaatccgcgactacaacaaggtcctcgggctaggccaacacagccgtgtatttcagttcgatgactatgcattcgacatcagtaacaacgattacctcacagctttggctgccggtggctgttgttgtgtccccacacctgaaaaaagcatagctgctctgattgaaaatatcaatatcaccaacaccaatatgagcttcctgactccaacaattgccgtccaactcagccccaaagacgtcccgtcgctggagctgctttgtatcggcggcgagcccatgtcaaatgatctcctcatgaaatggggacctcatgtgaagctggtaaatcagtacgggatgggcgaggcggccaccttctgcgcgtacaacgacaaccccaaggcaggccatgatgccgtcgtcggaaaatccggtagcggcgctatttggattgccaatccctcctcgtctgagcggccagttcctatcggcgctgttggcgagatcttgattgaaggcccacatctcgcccgtgggtacttggatgacctctgccagaaacccgacgtgggattccttagcacagtgcctcggtggattgccgatctccacccgtcgcgagcgccgacctcgcgcatctatcggtctggtgatctgggtcgatatcgccacgatggtactgtggagcacatgggcagaaaggacacacttcttaagctcaacggtggccgtgttgagtcaaccgaagtcgaatacgtccttcggaagaccctttcgcctggcgattttaccgtcgtcgatatgctcggtgagattgacggtggcgatagccccatcctcgtcgcttttatctacttgctggataacccagcaaaccttcttccgggaatctcagatcaggaaatgtcgttccttcccattacaaatcgtgtccgagtgaacggcttggtggaggcgatgcagaatgaagtctatagcacgctgccaaaacacatgatgcccagcttgtttctccttgtcgatcgaatcccacgtacaaggtccaacaagcttgatcgcagaaagttgcatcaaatcgcccaaaagtggtatatggggaacccatgtctgtaaagtgataagcactgtttttcatccttctgatttattttctcttctttttcgatctggttcatgtgcaagctggggcagatgttgactcgcggcggtttggtgtctactcattatttaatcacatccatagcggcgggtttcctaaaataaaaccgtggtcttattgagcgtcaggtcctcagactctagatatacgtgagtttctctataagggcctgtctacaccatccaagatttgagaacgcgctctcatacaaccttggaagcggtggcagtggagatcatagtacatagagttgacacaggtacatacagtaggtaatcagtgtatgcatgcgtagtgataaactaagaactgctcctataagaaaatacagttcatgttaaggaaccacgtgtaagttaaacagggctagtggtgcacatttgacaaaatgagattagaaccgagtatgtactaaattgagaacattagatatatgagaaaaggaaaaaaagaaaaagaaaaccatgggctaagtgaacaatagagggaaacaggaaatgcctgaaatgccaatgacacaaaagcgcgcaacaccataagaggcccacgaaacgacctgatatacgagacttcgtggacgtaaaaagatcgataaaacacacatgacagaaccgaagaatgatataaacaccgatgttgtttagaatgaaattcaaatcagaatatactaggtagaggagaaactgatcttgcattaaatggatgaaaaccatatcctgaaccatttcagcactaggttggttgcggttgcatctggacctggaaggtatgctgatgttcatgctgtggtgcgggcgggggaggggcttggctccgctgtggaattggtggtctgcgtgattgtcctggtatcccgtggacaggggactcagacatcgggtgttgcatatgttgttgcatcggagattgaagatagggctgatgaggaagaggccgtggagggtggacaggagaatgatgatgcatttgcatgtgtggcatagagagcggctggccaggctgctggggcagggattggctgtgcggcaagtgagaaccgggttgtgcagacatgtgttggttctgttgctggtgcatgtgctggacttgcggctgcccaatatgctgatttgcctgcgcctgtgaaggctgattctgttggaacatatggaggttctgctgttgcggcagagactggccttgaagcatctgcgttggtgtcgggcagtgccgcttgcgcgactcttcatcgattgaagaggttgcacggttcagtatcgtcgttgtatctgcaccctcgcgcaattgagagttgacctctgcttgcgtctgatctccactagccgcggcagcggctggcgctgccggcctcnnnnnnnnnnnnnnnnnnnnnnnnnnnnnnnnnnnnnnnnnnnnnnnnnnnnnnnnnnnnnnnnnnnnnnnnnnnnnnnnnnnnnnnnnnnnnnnnnnnnnnnnnnnnnnnnnnnnnnnnnnnnnnnnnnnnnnnnnnnnnnnnnnnnnnnnnnnnnnnnnnnnnnnnnnnnnnnnnnnnnnnnnnnnnnnnnnnnnnnnnnnnnnnnnnnnnnnnnnnnnnnnnnnnnnnnnnnnnnnnnnnnnnnnnnnnnnnnnnnnnnnnnnnnnnnnnnnnnnnnnnnnnnnnnnnnnnnnnnnnnnnnnnnnnnnnnnnnnnnnnnnnnnnnnnnnnnnnnnnnnnnnnnnnnnnnnnnnnnnnnnnnnnnnnnnnnnnnnnnnnnnnnnnnnnnnnnnnnnnnnnnnnnnnnnnnnnnnnnnnnnnnnnnnnnnnnnnnnnnnnnnnnnnnnnncgctcttccgatctaggccgcccacgtggtcggcccgtgccaggtgcctttggtttggctgaagctggcttccttggtttagggggtggtaaaggttgacccgttgcagctgcccatgcaatttgatcagccttacgaggacgtccacgttttcgcttcagcggagtgccgtccggtcccagaataggcgttcccttgattgtgctattcggtgcggtggagcctggagcggtcggtgtcatattcgcagtgaatgaagcctgtcctggctgaggaactcccggcatagactcgccgttttgggcagcctgtgcggcctgcgcagcaagcctagccgcaacttcctccttcctaggccgtccccgacgacgcttcaaaggcggagtggcaatctggtcacctccaactgtggccacagcgggcatctgcccttgtccgttggcctgtgtggggacagcgctaggaacagtcatggaggcatttagctgaggttggacatgaggctgggattgggtctgaacagcttgaggttgaggcggaggagccttcttggtcttggctttcttcttcggtgcaggactcgactcgtcaggctgtatgaccggactttcagtgactgcagagataaccggtgcagctggctgcgatgaagacacggcagctgagtgtggtccctggtaatgctggaactgagcctggtgcggagatggttgaaattgggtctgctgcggctgagaaaattgcgtctggtgtggggcgtactgatgttgcgattgaacttggtggtgctgatattgagatgggtggaatggaggctgagtgtgttgggaaaacggtgattgttgttggtacgggttgtgcgcctgactttggtgctgcaatttttgcaatctctgctggtccagttgctgcttctgctggtgctcaagccgctgctgttccagccgttgctgatgctgtttctgttgctcgagcctctgttgctctaggcgttgttgctgctggtgctgctccaatatcttttgctcgtctagcttttgctgctccaattccttctgttgctcaagccgctgctgctgttccaagcgctgctgctggatttgcttttgctgctccatcctttgctgttccattctttgctgctgctctagtcgttgctgctggaactgctgctgttgaatctgctgttgcagctgttggtgtgtttgctgaggtgactgcggctgtgactgcggctgtgcctgtcgctgttgatttaaagcaaacatagacgggctagccatagacggactagcagaggtatggttatccctctgttgcatgcctgcgtgaggtagtctgttcatcgcctgctgtggcgaaggaacactcatggggtgtccatgagtgaggccggttgtccctggctgcggccgaaggtgggccattggattaaacccacgctgcaggttctgcagcgccatagggtctgggttgcgagacataagatccggggagctctgcgccgtaaattgccccgggaattggccataactgctgctagtggggtagccacccaatgaccccgatgtcggggtcatcttacgcatatctggagattgcgacgcagcgaagttctgctgaggttggccccgaaaaattggcttgttgcccgggaagggactgccatgctgtggcagcggcggccccgcacctagtaagggcgattgggcatgctggcgttgaggctgtggacctaacggatgttggggctgaacaccttgatgttgttgctgctgagactgctgcggctgttgagggtgaaattggtgaccaccgtagttcatcatcttgagtcaattttagagatgcgctggcacttggccgtaagcggcagagaatggagtgatcctttccaaccgcgaagcatgcaagggcgagaacggtcaaaataatcgcgtactagcttgaaaaggaaatgtagaatatagaaaggcagttttaaatcaagactcgtcaccgatatgcgccagcgctgctgataattctatacggggaatcaccacctgagtcgcgccgaggccgcgtgtttgtttgttccctggcggctgaggccacaaggcaacaaggcaacaaggcaataaagcgaccgcgcaccggttcccaattgggtttagcggctacggagaccgagacaagtcggtcagcgcactttgagaaaatgagtcgacggtcgctcaaagggatccagggggggagaccagctggggggatccagagagacagcgaaggtgatccaaatctatttgctagaggccttaacggatgtcagggcctagcagaagtagattggagatgaagtggatgacgctgggctggaatcctcgatggcgagggaaaaaaacattaaaaaataaaataaaaaataaaaaaaagaaattgggaaaaaacggaattttcagattctcctctccacatcacgtgaccccgaggctgccatagtgtggccgtgttcaactacactctctacccaaggtgagttggatagtctattcatcatctcgagctgtggaggtgtgaggtttgggatttcgaaacacctgaaccttcgtttgtctccttcactcctcaatcctcactcacacactcggccatctgcttatcttccgcaatccttgcaaagtatagaaccacaccactcacaagtactacacaaagtacgtgctacctgaaaagtatggagacatcatgctgtttcctaacatccttgtcctctgctacccggagatctgccaaatagggcgaaaagaaccttgaaacaaacccctttcaatgtgccaatactgacgaagatccacaatgcaaaccacaaatcaggagcagatctgcacaaaattagccgagcactataatatatgttgtatgaatatatctttgatcttgtctttctgagaatattcaagaaaccgatagacggtcttttctatctttcctattctgacgaaagtagcctctggaggtgtaaacatgtgtaaaaagaaaaaccgataaacggcgcctcttttgtaaatacacatgaaattatggaagcgacagaaaaaaaaggctctaaaatgtgcattgaaaaaaactaggacatgtatatatgatcaagtttcaaggtacagaagtaatccctggacagattacaaccctatctgctctgccgcaacatagtcttcccagaccttcttaatgtcattttgataaatgaaatccttgtctccatagagaaaattgtcgattttggctttcagaatgacatcaaaatctttctcttctgcttggagttgttctgctttgtcacgtatttcgtctagatgctgatacctgcaaatggtcggaaaagcggcgtcagacaagccattttgcgcacgctttcaagtttgaacttacatcttggcatagtatggagaccggatctgttcaaagatctctagagcgtctcgtgtagggcgagaagtagcctgcgtaaactcaagcgcccgtgcgaggatccaaccatcctccatggcaaacgtcgccccagatccgaacgcccctggaaggctgttagcacttgacattataaccttaaatgataacacatgaacttacctgaaagcgggtgactggcatctccaatcagggcgactttatcccagtcggtgatcttgtttagacgaggcccagcgaatgttgcaaactccctccattctccttcaggaaccgcgcttactgcgtctcttattctttggtcaaaagcctgtttatatgttagcagtgagtcttttttttcagcaaagtttctcgcacctcaacacgggatcccactttctcgttggttgcagggataccccagaagaccgtcttccctgagacctcaggctcacgataggatcgaacagtgatttcaaaaagcggatctttggactctgcctcatcgtccacatcagagaggtatacatggccagcttcaccccaccaccatgaggttgtagtcgtgatgtccgggatgtgggccagacgagacttcggaattagaacacggaacgcactgttacctgtaaagtgcagtcgatgatcaggcaatagggccctacggacaacctatctcatgaaggtccgtcagtcacacatgccagttttatcacaagaggctcgacgaacagagtgtattccgtccgccccaacgacaatgtccgcaatcgcttccgtttcatcctgaaataccaaccgaaccccccgacccgaaaggttctccaaagatacaacctttttgccaaattggatcaagccctcgggtactctcgataagagagctgactgaagtcgggttctgcgagcacggattgatccgcgggaatcagcagcggaattttctggatgctcagtgatgttcaaaatcttccctgtgtaggcatttcttccaagaattgaaagttaacatatgcatttgttgttactgtgtccaggaaagcatcgcttacctttggtgtgtgttggatttggagcctcccttgacgccatcactagctccaagtaaatctagaactctccatgcatttgtgctcaggctgaggcctgcaccggcttctcggggctccgtatttttctcatacagagtcacctttagaaacggcagttctgagagagcaatcgccgtacctaatccaccgggcccgccaccaatgatggcaaccgatgtcaatgcttgtccgaccatatttgcgaaataattgtatgtttagatgtggtggtttccgaatgttgggaattttgtcttgcttatatatccaaagtattgcatctcgcggtcggcgctggccggtagataactccatcgcacgccatactaagtctcgaatgtgccatacggcactagtatgatactgcccaccaatcccacgacaacggattaagaatcagaccccgcgcgtggattgtcatagaatatttcgatttggcacgtgctggcttgttggtgagtcgatcagaccatctccttagttgcaagtcaagggaatagcgttggcccgttgagagaagaggataccacctcaaagccaattgaccccttatcatggatcactgatgtctagctattagtcttagtgagaattgtcaccccggtctctagcctgctatggagagatcaaggttgaggaatacgacctcggaccttctcccatacaaggtacatgatataaccccggggataaggtcgttcgagtcttgcttatcaaccgtatatcgaaggagtctagtagtagcagtgtacctattctctataaacatcttcaagaccaatgatgatatgcatgttctactctatccctaatatagatctcagatctcaagcttgccacatagcaaatctccggttccagggaggctgccgacatccccaaagtgaaggaatgaggcgactttaactttgtatcgtttttcatggtcataaactccccgatttgggaagagacctttcacatcataccgaatgatgatctcgaatgtacaaaaagcagaaatgccaagtcgtgagatactcctcgatgggatagtacttctggatagtacccagaaaagtatcatatgtcacagatgtctagggcttgatatatcaatcggacgttctgattgttgttatgatcttttggcctggaggtactggaggtcaggtgcagcttgagtacccgcaacgcgttgtaatcacgtgaaccttggcactcgttcccgcccaaacgtaaacaaccgactcaacctaatataccccgattcacaccttatggcagctacataacaccgctagggggggggggggggggggggggnnnnnnnnnnnnnnnnnnnnnnnnnnnnnnnnnnnnnnnnnnnnnnnnnnnnnnnnnnnnnnnnnnnnnnnnnnnnnnnnnnnnnnnnnnnnnnnnnnnnnnnnnnnnnnnnnnnnnnnnnnnnnnnnnnnnnnnnnnnnnnnnncggggggggggggggggggtgggtgggagggtttatgagcccccattaactccttcgcgacatggagaaaagctttcctcaacaatcacccaggtcatcgtcgagtcctcgacatcatcgagccggccagcgatcaagcacttgaacagcggttccatcttagctattatgctagatttatgcgaatgctggatactgatgaaattcttcaatgttatgtggaagacaaggtccagtggattggctccaccagctcactcacctcatttcttgcttactcaaatcatcgaaaagatagttacgattatcatccaagcctttcccgtctatctgcccgaatgcctgccgagccctcttcataagaacttcttcgcagagttggtttgggaaatatcaagtcaattaagggtgcttcaaaggcgtgacgagctcgcagaatacgtcgaagaagcgaaagttccctctgtttcctcggcgattggtcctcccggttgaattgcatcaaatacatgccgaataatttcaactcaaagtctataagtacaccaattcggactgcgatactgttgacaatctccgcaagcgtggtatccgcattaatgctgtcggtcttaagtcccactttgttgtcggccagacgccatcgcttgccgatcagctcgctactaagaaggcttacatcaaggctgatttggatgttattatcacaggacttgatattcgcttcgcggaggagccatactatactgctaacatgcaggaacagcaggccgcggactactacctctttgttcaacgctgtcttcaggctggacatagctgcctgtcatgataccctcaaggctgaacaggcgtattgccccgttgttgaggtgtgcaaggtaataagtgcactttttgttggcctattggtactgggtcatatttgagaggagaccttgaactttgtaaagagaacctaatttgacttttacaaatacttttaaaaagttcgcgtcaccgggcggataatttggatatctcataactcttaagcaccatttatcctagtctagagttgatcttgtgcctgtgcttttgcaatcgctcctggggcagcaggcatgagtgcacctagaggtggctggttcttccctttgaactcatcgcacatttgttcgaatgtaacccactccactccctcatgactattgatatattcaatgagcctgcatatattgcattagtctcacgttggccaacggtccttgggtgtatgaatatgaacgtacctttcgtgcatgagcaaaacatgaggccgacctgagacatcgggatgaatcgtcatggggaagacaaactcgtcgtattctcgatagaaatagtcgaagtgatcctgtattaaaagaaccacgtcagaccaaattctcctggttctggatgtaggtagagactaaccttccaaatatcctcaacatcacgcggattaacccatccatggctattcgccgaattcttgataaacatcatcggcggcaaatcatcaatataccaactgccaggtatctccacaagtccagtagtattgcccctgacgagtggtttcatccacatctccgccttctgcttgtagtcaattttcgtccatgtatccccagtccgcagccagtacatctgacaatcctcatgggacatggaatgatcatattcaattccataagcgagcaagagctcaaccatctctgcactagcctcccaccacggcgcgacaattccgcgtggtggctttccgcagaactcagtcaacatcttatatgtcttgtcgaggatgtcgcgctgttgctccgtagacaagtcacaggggttttcatgcgagtagccgtgcaacccgatctcgtggcctgcgtcccggaccatagcacattcttctggaaaggtgtctagggtgtgacctgggatgaaccatgttgctttgatattgtatttttcgaaaagcttcagcacgcgcggtgtgccgatgtgtcctgcccagagacctgatttttatgagttttgtcgatgtgagagtgacgatctcaatgacacattagcttacctcgactgatatcgctcacgctatcctcgcctccgtatgagcctagccagccagctactgcgtcgatgtcaacaccgtagccgacaagaactcgctttttgcccatggtgattgggtttgatttattgctgatgacagggaggttgaggctaagattaagaaaaataatgggaaattgattggaatcaggtgtaggcgaggttttgttgatggaaatatatatggttctctacccccaaccatgcaccacgacagacaaaggtggggtgatccctaaaggcgttcaatcggattttgtcgtattgaaaatatcttcatgttatggatagctatttatcttgatcccactcatgattgactccgactaccccacttgaggtcgtctgctctagcttgtgatctatcaccaccatgacttgttctggtatagttacaataggccgacatggatccatggatatgtgcctgcaagtttttaaccagtcctcaatagggattttgctacctggcgttaactctaaattgatcgcacacctttgtcgtcatttcccccttcatttcctgtcatcttccccccatcacgctcacgatgcccgaaagagaacctcgtctagttcttcccaagatgcttggtgaaacgatcaccacatactgccctgatcctgatgaccttttattatcttctctttacaaaacacacgaatggattatcatggagaggctgagtgagggaccatgcccaattaccccagaggattttaaccaaggcatgggttctgtatctactactggaacatatctttgtcgatgtatagatgaccccggatttgatctcgccttcatctgtatctataaagaaatccctctggatggcactgagtttaataatttagagaatcggaagaagcaggctaccattgaatctttcgtggaactagatgccttgaagaagtttacagagaccgagtgtactgctatccctaaactccttggatatcaaatcaatagccaaggcgtgaacgacgttatcccccgcggatatattattcaccttatattcgaaaaggtccgaggagaacctcttgaatttgaggagttctggagctttcccttatataaacgcaaatctatccatgataaattcaaagttgcctatatatttgttatatagtctaattataatcacatctttcgagctaactagaattagggaaattctgaggtataggttcatgcttttatcaccggaatcattaaatatcatacttgataaagacacaggtgatatatatggtatcctataccctgaatactcttggatcttgaactaatattacatagcaaaatcaccggtttcgatatggctatagagatcgacccagagtacgaatggacagacatcaacttcgtgatatatgacctggtcctgctctcctcgaactatgagaagtacgttcccatggcgaatgatatcaccactgataagtacgagggctggaggtggtgagaaggagggttgatgctaaatgtcatgatctttttgacttgtttgcttgcttgcttcctgtttgctgttgcttctttccttggttcatagatgtttgctagctaagcgagatgattgatatctgccatgtttgtagcagtagtcagctatataagcaggcaatggccaaaggccacaatataaattccacgtagatgaacgactcatgactgtaactgcggtctcgcggtctcacacgaatcttcaaaataaatggttcagaattctaagctgtgtcgattgtgaggcgccagatcgacctttaagaaaaaaaagtaaattcaattaaataactaagatggagaaagaaagaagaagcaagttgtaaagtggaagcaaccagttgatatagctgaccactttgcaaacgttgcaaaccttgaaccttctcgcttagtgacctagcaaacaatctgtctaatgaagtaaacaatgcaaacatgaagcatttgatatcgatctattgtactctgtagaacgtgacatcaatccctcaaagtttcctttcctcaaatccgacccactctcatgacaccccatttagatgaggctttgataaattccaatatttcttcgattgcgagtcggtaggagcaagctatggtattaaaaaagataggcaaagatcagagctcttatcgtgcgaatgaattgggacaacccccacctttgaagcttgcgtactgcgtggatttcccgaagtggtttagtatcactctagtattctgaatacgcatcacatgacttacgaccctattcagagatcacctgatcccctaatctatctgtcaccatgaagatcgaaattaaatcgtgggttcgaatcaaatactctcagctagctagcatttaaacgccgttttcataattaatttttttttcctattggtggtagttaatttgaattaattcatggggaagatcatgtgatctctgaatagcttcatgttattgacataacaggtaatctctaaataccaggtacggtcctaagtcatgtgttggctatttagaatactactagttaggtatagcatgtcgaataccctaattaattggttatgaactttgggagggaaagcatagaatgtttgatattgacagtaaagaaggtatgactccagacatgatggagtaactaatgtattaatgtatttatttgagcccaagtgattgaataatatcttaatataaccatccatccaatttccaatctatgatggtatacgaaaaaatcccaaagcatcttctcggcctatccatcatagcgcatcgtgtccatgtgtctcaaacggcaatcccagacacaaaactccgacaacaatccacaatgccgcgctcgcatagattggtgcagtggtaaaaccggtctgcgacgagataatactggcgacgagtcctccaaatcgaaggagcgcagccgctgttccgcaagccgtgccacgatgaggagctgggaatgattctggagtgaacgcgtacataatagcgtattctgtgacactgattagctatgaaattagacatcggccatgatagcagtctcaccgaaattgcctagaaggctggtaacacaagaaaatgccaagtcggctgatggagtgttgactccgacatatgcgaagaggaacacgcctgtgacagcggctgaaattgacatcatccatcttcttcccatgcgggtattaaccgatactgcggcagataatggtccgactattccgacagctgatgtgatgcagtagttgcgatatgttagggagagagacgatttttctgtgaatttggtcgcaaggtaggaaggtaagaaggcgaagaacagcgggtatgcgattcctgaatagtgtgagtagagatataataaggaattgcgtctcacttaccgactgtcaaccagatggcccaaatgatcaatgtctgtctaccgagctttggagttgcgaacagtgcacggtagtgctcccctcggaacgcttgcatgttctccttcacaatttcttttgttgacattcgcttagactctccttcgctgggagtatttccaaacctggcatcgatttcttgaagcatctcaagcgtcaggggctctggctttccattttgtttcgcaacataattaatggcgttgaccgcatcctgatctcttccctgggagagcagatatctgggggtttcagggagtttgaaaacaaaaatgcgtatgatggtaaatgcgagggctagacctcctagagtgatgagtgtgtatctcctaatgattcgaaattagcgtggaaatgcactgtgtatcatggggctcttaccatcccatgttctggcttcgagaacatgtttctggggtggcatcagttggacaactaaagtgggctaggaatacccaagaaatcaaggagacaataagttgactcagattccaccaagccgaaagagctgtgagaagatactgatgactggaggtctttgagttagcagcggctcacagtaatatcgtcaaattgaaaactctcaccttcctgggacgaattctagaaatatcatcgaatcaacaggcacatttccaccggctgcagttccaatgactgcccaaagtgcactgaatgcaatgaagttcattgaaccagcagcggcacacagaaatatgccagcaatgagtagcgtacaattgaaggctggcttgcgtccaatgagatcgctcgatagaccccaaaacgaagcacccaaaatgaggccaacataatacgcaacggaactgtagctgacttggacgataccagtgaactcttgcttgataggtggctggacacttccaatgccctgtgatgcaaactattcgaagtatatgttagcaagagtgatttcaggaggaaagcagtgatcttgcatacattatcgactatccatccgaaaccggtgaccacgaagagtttccattggaacctagtagtgccaggatatcagtaccgcaatcaactgctcaagattgagaggagtgaataccagcccattccaatttcctccaggcattttcctactaactcagacttcaagcggtatgccttagtggtagaggatccgtagaaatcctcaacctcataatcatcaatagtcgttagcttagaaacctcatagtccggagtgctgctctctgttggccggatctgcttcttgtcgacttggatttcgtccatcttgcaattggaaattgagtgaggaatttcttgctctcaatgtagacatattcgggtcaaatgtcgttctcttttagggctacgatgttgctgccaatcgatcatcttgtctgatagtccatacacttcaggttgatacggatggatccggctaccaagagtggagagaaaataaggtgccatcccactcttgggcccgggacgcgttggatctacgatatcacaacagcttagaccaggccgacaattacttggcggcttcactgcacttcactctattaggtttatcgatcaattgagccaagcaatacatggttattcagtgctttttcgtgttgtgtgctgtagaatgtgctaatattgcaatttcttacttctattttggggttttggggttttcttcggtacgagagcatcaaatatgtagaaatatttataattgcaatatggataacactaggcaccgaccgcagcaacaaccggaataacatctgccttctgtaaatccaaatccttcttgaattcctcagcgcggccatagctctccttgtaagacgctgtaaccatatcctgcacagtaattggaccgtacttggcaggttccccctcttcgcgacagttaggcaaacactcgcagatatagtccgggtttccactgaaaaagaacggaatcgagtatctctctcgaccggatttgttgatcacacgatgggtgttggatttatatttgtcattcgccatgcgcatgaagaggttacccaaattcacgacatacgctccaggaacgggtttgacctatcaataaatctccgtcagagccaaggtcaagacactacgtcagtcataactcacatccagccattgacctgatggcgcatctagcacctgcaacccatcgacctcatcctgtagaaggagagtgatacatccaaagtcggtatgcgctccgatgccgcgattcaatttctcgtcggtgtcctccggctgcgcgggatagtgcaggtatcgcattgttgcaacggctccgtctgtgagagggtcgaagaatgttgattcaactcccagcgtttgagccaggacccccaaaacatcctttgccagatcgaacaccgcgtggtagtattccatggttgtttcttggaactcctccttattgggaacagtagggggccactggttggggccactgttcagtttcttctccagatagtaggggtggtcttcggggatttcctcgccgatgtacaggccttctttcagctctggcccggtgcctacttctagcatttgcgaccggaggagttcatagcctctgttgaaagtggtgagatctacttggttagcagaattcgcgatgagcgggtaaggatcttactcttgtcaattttcaatttctcctccaggggaagatcaaagaagcgcctggagcaattcatgacacggttctgcaagtccagtgggatgcggtggccagtgatctgaaagaagccattgtaatggcaacatttgcgcacttctgcgatcaactttgattttgcgtcgctatcctctccatagaatggagagaaatccaagatgggtggagctgcaggtagagacatagtagtggtgagttaaccgatgaggtgtgcttatgtttgcttttttagatcgcgctgctttcaatatatttctgtggaattgaataatagctacttcaagaccgttcaacctcgcacagaagtccgacatctcgactcgagctactccagctgtagctggagctctgggatgagccatgaaagatgggggtggtgacaagaatgtccaagaatgggggtcaacggttttagctcgcagcgataagggcgtgcggggaagacatgggaagaacaaaagtcaaaagtccaaaccatatcctatctggagaatctggagatatggctattggtcacgtctggttggatatggctttttgtactagtagtacatatgtgaacgtgaaagttaggaggttagaagagaggaaatattgcttagtataagaaccctgtccactaacccgtgggctagatatttgagaattagcccttttgaaaatatagttactatgatgtctgagttaaaatcaaccgcaacagccaaggtggctgaccccgaagtcaacgtaggggaaaccaccacttatacagatcgcgatgccgaaaggtcctatgtcaggaaaattgatttcattgtgctcccaacgctgtgcttggtaggttatctagcatgagaaacatacctagtagaattatcgctaacttcgaggcttttgtcatcgcacagatgtacttttttgactgcatggatcgggtaagtgccgagaagacggcatatgcgttcccgaaacatgctaaccatcattggcagagcaatttggcaaatgccaagacagatggtcttgagaaagacttgcacctgaagggaaatgactactctctattgattcttctcttctatatcccattcgggttgttcgatctgccgtggaaccttttgatcaaaaggttttctggaagaatcatgctgtctattagtgagactctccaaccctttgagatttgcttggacttgctgacatataaatgaaagtgtctattgtgtggggagttctagcactatgtcaatgcgccgctaaggactttggctcgctacttgcgattcgcataatcttaggtgtttttgaagccggtttcttcgccggagctaccttttacctcaccttgttctacaagcgtggggaaatgggattccgcctggctatcatgcagtcatttgcagttctagcgtccgctttcagtggattaatctcctttggggtattccaaataaaccacccggcagtcaaagggtggcagtggttgtttattatcgaaggatcgatgacattaattaccggagctgtggcgttttttgtgctcccagatggggcacagaaagcatggtttttgactgatagagagagggcggcagcgacagcacgtctgcttcgtgatacctcgtctgaggtgaatactccattcaatctcaaggcttgctttgagtcatggaacgactggaaattcccagtgtggtgtttgattacgttcacataccctgttgcgtatgccactgcaatgaatttcttccctttagtgagtatcaaggagcgtattgtcgaacgttggctaacgatagcagatcgttcaacgattgggatattccgtcgtcaagactaatttatggacggtggcgccaaatcttgtcggagcagtattcctgctatgtgtggccaagtcctccgactatttccgcgaaagaacgctccatattgtcttttctttgacaatttcattcgtcggaatgattatattaatcgcgattgacgttcagaacaacaagggagtagcatactttgcctgtttcctaatggcagcaggatcatatattccgtcctgtctcgttcatgcctggcacaacaataacaacgtccatgaaaactcacgagctgccaatacgggcttttttgtaggactggggaatttcgccggagtactgagcgcgggcacattccgaactcaatacgcaccaaagtgagatactctgctattatataaaggggcatcgctaactgactaggtatctgccaactctcatcgcaacttgttgttgcaacgcagtctgcatagtcctagttcttggattaggaggctggatgcgcatggagaatcatcgccgagatagcaaacagggactaagactgagagaggaccagactgatactagtcagtttaaggagggcgaaaagagtcctgagtggagatacttcccttgatatcttcgggttgtccatgatatcgccaagtagccctagctgagaaatccaaattttaccgtcatcttttagttggtgtagttcacttccctggctatgcatagaaagtacccctatatggtttattcttttgactcttaagcttttacaaatatattgctttctactactgcgtgtcatttttaatccccttttagttataacgtctttaacgacatcatagtgtcattatataactataacctctattgtatcatttcaagcaagataaatcgaggccgataggcggttgactactattatctgatcgaaatcaagtattcaaatcttacgatgcccctggggtatttggagaacttccccaacatccgcaatcccccggccctagtgggaaattgaagagcgctaagtggccaaaacctcaattggaaagaaatcgtctcgataagagctttgcatatctttttcaaattataccaatcgggaattagcgtcattttgtccccgcatgcttatcagtagacatcggcgtttaccccgagtaaattattgtcaaagacattgaagtgcacaaccagatctcgtttcgcacatgggcaactcaggcatgaaaaaccaggaaaagcatccgtgccaacacccaggctgtagcaaaagcttcacgcgcgcagagcacctgcgtcgccatgcgctcaaccacgagcaggcgcgcaatgggtatacctgcgagcgttgctctgttcactttcaacgctcagatttgctaggtaagagaataaactaggttcggtggctaggcaggtgctgatatgggtccagcgcgccatgtggaacgacaccagaaacgggatctcgaagctggagggcctgggcaggggacactcaagactcgaaagagaacccgcagagccgaggacggttcgattgttgttcgtccttcgcagcgacaactgaggactgcggctgcagctcgatccccgatctcggcaaatagtactagtcaggagccagaactgcgagatgaggtagagtattttaatgataatgttcccttgtcaccacctggctcgggcactgatccaacgtcgatctctatggatgacacagacccgtttctggcttcgttggtgccagctgggccttttgagcagtatgttgagccagtgcctggacagttcgatgcagcagatggttcttttggtgttgagttggatgggattggggattattttggaatggacaccggtatgggtgactccagctcgttggtcatgtttcgtgcgctaatctcagcagcaaccgacttcaacctcccatttgccgcgacgtctaattataattggctgttcgatgtttcctctctcgacgacgctttccatcaattcaacctccccctcggtttcgacacggcgcccattttggaacaattcgactcgaattccgccgaaggaccggagaaatacgatggccaatcggccttactcatggcgtcaatcatggacagaggcgaaacattcggagagaccgcctcacctgcagtacccagtctcccagacctggactggatgtctggtgcggcgacgctggaccctaaccctccaatgaatctaccgacaatatctgaagaagaccgaaaggggattctagcactcgttgcacaggcacatccaacaagcatggatggaaatcccatggtactcgactcgccactcctgacactccccgcgctccaggcatattgtgacatgttcttcgatcggttcaacacgacataccctctgattcaccagcatacgtttgacccaagcaccgcgccaccagtattcctcgcttcgattatcttcatgggcgcgacatatggtacgcgtgaggctcatcaattagcagtggaggtccacgatgttctacgaagccagctactctgtcatccagatttctcacctcaggctgacctgtgggtcctacaaaccatgcttctgatagactgtttcgggaagatgcgagctggtcccaaacagcgcgagcgggcacagttgttccactgtgtgctgatcaaaatgatcaggcgcagcaactgctgtgggatacgcgacctgtccaacgtcaatcagtcaggggatttggatcaaatgtggcgacaggctatggaagaagaacagcgtaagagagtggctatacactgcttcatgtgggatacacagcacgcagtgttattctcgcagtcgctctgtatgtctgcgttcgagatcagatcttcattaccgtgtggtcctgcagtctgggacgcctcctctgctcgggagtggtcgcagcacgcctttcgtgaagagaacaggcaattcctgactgttttgaaaggatatatcacaccggcggctgtcgcccgacctcgagatctgaatgttttcgctcgaattgtcgttctacatgggttgatgtctgtatctgcggacctgaaacgtcgcgatcagacaaccctacggtcggagacacccgagcgtgtcggggcttggacgccgcgcatgggtcggtcctatgacctgtggaaagtcgacttcgatgccgattgcctggcgattaaacttgctcagactgccagtcctcggcagttcacggggctcaagatctccgggtatgccctttaccatgcagcgtatctcgcgttgaatgtcgaggtcctcgatttgcaaattgtcgctggcgcgtgtcagatcctgggtcggacagttaccgaggccgatcaggcacggtcgctgcggaatattacaagatggctacaggaggaatccggaccatcctgcagtactgcacgccaagcggcatcattacttcaggatgcggtgttgagtcttcatgactgggaccaggctgattccttccacttcccctggtgtttatatctatgcacgttggcctgctgggtttttcatcgtggacctaatctcacatccgacgacaaccgaaccaatactgatctgtcttcgttgatcgtgatgctaactaattgtcctagcttaccggagctagcggttttatctggcaaatattgtcctcgccctctagcaggagctatggctaaacaactagcgactgtccggtgggctgttgttcacgatgctatgaaagttttgatgagattgtcatgatagtctttgtattctttgtatttgatagtcaatatgtagtttcccaatccgacatgttgatctgaacaagtgcggtttatctttatctatttactatagaaaggataatcggtataacccttctgagcaggatcagcaccatagaatgtcgtgcgatcataaggagtcaaaggcaaaccctccttcaaccgacgcggcagatcagggttggagatgaaataacgaccgaacacaatagcatccgctccacccgtggcaagcttgacacccgcattctcggcgttgaagtttccggccgcgaggagagagacccctgccttctttagtgtcggccggaacacatcaagtgacggcttgtccgaagccagggagtcgatcttagacgcttcatccatcacctcatcgaatcggggctcgaccatgtgcacgtatgcgggccgcgattcctcgggcagtccagcaatctgcgaacagagcgcgagccagtggacgttggggtttgagtcccgtgtatcttggaaataattgtagggcgacagacggatgccaacacggtcagctccgatctcggcggtgacggcctcgaggacttcgattatgatgcgagatcgcttttcgatgctgccaccgtattcgtcggtgcgagtgttgacgttgtcgtggagaaattggtcaaggagatatccattggcacctgattcgttagtcacagcacatcatcaaggctggagttattcttaccgtgaacctccactccatcgaaaccagcctcgcgggctcgctttgctgcagcagcatactccttcactgtatcttggatttcctccaccgtcatagcccggggtggtgaagctgcgtactcagatccatcgagtgcgtttccgctgattgggatctcactggctccaagaacttcccttccttcaatcaaggaggaaacagttgcgcggccaacatgccacagttgacagtatatatagccacccttagcatgcacagcatcggtaaccttcttccagccagcgatttgcgaggaagtaaagatgccagggactcctgggtatccggcggcctgaaaatgttagtttctcgaactagtcaaaccggtcaaactggccaaacagcccaaacagaagaaaattcacatacatatctgctaatcggagtcgcctcggtcaacataaatcctccatccgaagctcgctgcgaatagtactcgacattaagctcattcgggacataaacaccctcggactccttgctcgctctcatccgcgtcaacggtgccaaaactacacggtgcttgagagtcagagcacccaagcggacggactcgaacaaaggatcggtgactgcgattgaacccatttcgtaaggatatatttactttgcgattggcacattttggctttggctaaggtaatatttatagcttggaggggccatggtatgccatttttggcggttccattcttgacttttccattgaaggtgggatcattgatctgcttgaatagtgggatgatggtgaggcttgagggttcggctatcaaggaaaacaacccccactgtaaaacgagctcccccaccctcgaatgtgtctccactacccctttgggatggatatggtggtgatctgactgccaatgtatgctttaggtaccaacccctgaatactaactctcgtactccgtcgtctcaacaaatatcttgttgatctcactaatagtgactacgctcggttctatccgatcgaattgctaatttcttctcgtcaacttcatcccactatctagttagagcataatacctcggttgactgtgtggtgtacaaaaaagcgatgataatgtagaccacattatacgcaatttatatgtccacattggagagcatattaatcgaatagaagtgtacaaatagaaacactacgactaacctcgttataaccatactagaacaaagaaattcccaaaatagaggaaaagtcaggtcgaaaagacggcgtgaacgtgtcaataaccacaatttgtatattcatttctaaaacgcaagcccaaagagttactcctaccaaatattataccaagaaagagaaataatcctgcaaccactgccctatgacacccacttgttcggtgtcccaagtatcaatagccccaacatatccgtcaggcctcacaacagcgatcccaattttctcctggttcaaatccccaaaccacttctcagtacaactcggccctccaatattgtcgacatataatgtccaccgactagcctgcagtatttctggcagatcagcgatctcaaactcagactgggaagattgcgtgaccattgcgaaagtaaaagcattggagacagaagtgtagcgctgagcctgaacaaattcatctgacggggaatgccccctcggatgtttctcatacgactgatttgctcgcacgctgacaccagcaagaatatattgcaactgttcacatatattctccagcgattcccgggagcggtaaacattcggcacaaagatgtagatcttgaattgacccaagagtggaacatccaactcgatatcgactgggttagcatcaatatagcgagtgaccttagctggcagctgaagcattccaggctggaggcgaaatgtggtggttggcgcttgtgtcaacattcccggagcatattcggctccaatgccggatatgaaccgaatattgctgtcgaagttcttggccaattcttcatcgcctgctgcgaacgctttgcagtgttcaacatcgaagttgatgaggtcgtatgctatcttttgtctttcttcttcgtaggtgtggagtaaggaaggcttggccagtcctcggactaggaggttgagcttccatgcgaggttgaagctgtcgtgcatactcgtgttggcaccttgggctgcaagagcagagtgacagtggccggcctgtatattgattagactatgggtgatgtgaggtcaatccggtgcaacatacgtctcctgcaatgaatatatttgcctctgaatccatgaagcgttttgcaacccgctggcccacaacatatgttccaaaccactccactgtcttccactctaggctgaacggatgcattgcctccctcgcgcgactcatgacatattcagtcgttgcctttgatttttccactcgctccccgtcggtggaactcaactccacatataatcgagtcatacccttctcgcgcggaatccataagatcgacccagcggaatgagaccgcaaggccactttactccatagatcagggaagtccgtatcgatcacacctatttggtgagccaaaaatcgtgccaagagattgaaaagacataccatccagcactccccacgccgcgtttgttaattcgccctcgagctcagcatccgggatgaatgatcgaaccttcgatcgagctccatcgcaaccaaccagataattcgctctgatcttgtgagccgtatttgtggtgacatcctcatagataatatccaattgtgtcgttccattcacaggcgaacaagacacgaatttgctattccgcgtaatagacacaccccgtgcctccatatcgtcaatcatgacctcctcaaccatcccctgatgggctagcaagatataagggtcggaggcaccaacgtgctcggggtagtggactttgcgacctgtgcgtcgaagtgagtcgttggcagttgactcctgccaatttgttagccaaatccaggagcagaattgacctaagtcctacccagaaggatatgtcgtaaacccgagctccatttctcagcaatgggtctgccaaacgaagctgtctgaatgtttcgatggtcttaggttgcattccgtcggcctttcctgtggatgtcttgtcgggacgatcgtccagaatcaccacggcgattccaaagcgaacaagattacatcttcaaatgtgttagtataccgtccgtcgaagaaggaatttacatacgcaagcatcagccccgacggtcccgcgcccaccaccacaacggtagtagaagcatcgacagagccgattctgtagccttcgtggtctgcactaggtgacattatagaattcaattgttggttgacaatcacttaattcatttctatcttctctatttattgaaatcgatgctgcggggaaaacccccactcttcactgcagatgtttatcaccatcgtgtcaccccaccgtccacaacaatgtccgacccggtcatgtacgaactcgcgtcgcttgcgaggaatacacacgcccccatgatatcttctggttcggcaatccgaccgttcatgacttcggacttccagccctcgagcaaatgggggaactggccattagcggataacctggtgcactgccttggtgggaacttactgaagcggtcatttctgttttcacgaatcctggagagatggaattgactcggataccctgttatactaaattaatcaccgtccgtacaatagtttgcgcccaactcacatattcagccagctctttggcgatcgcgggacacatcgatctgactgcgccctttgtgccacaataagccgaacatagctggctgcggacagcgatatggctcgccatactggcgactaacacgatgctgccgtgctttgttttgttcgcgatcatttgcttggctgcgagctgggcagtgaagtaaagcccgaggacattgatagatagtagatcctgatgatccttgtaggtaaactcgaggaatggaagatgtcgattaataccagcacaaggaacgcaaatatcgagagcgttttcaaaatccttctggaagctagcgaacccttcttgcaaagactcctgggatgagacatcgactctgttgttgttagcgatgaaacctgaaatgaacagtcaacccacttgtaatacgcagttcggacaccgcaatccttttcgattgcatggaatccttcctctggcgaaataacatcaaacacagctacatcagcgccggcctcggcgagcccccgcgcaaatgctagcccgcaaccccgagcacctcctgtaaccagtgctgtgcgccctttcaaagaaaactggctcggttagctcgggccaagaaaaagttggaaacactcactctcgacatatcgcagtgtagctgaatattgtcttgctgtgtagtgaagcctttcccctcagacatgcctcccttttaagctatcggatagcggcatacccacgctaagctaacccccatctttgtacatggttggagtagagtgaaataaagatggagtaaccatatcccatgtgcctatctatcataagtagtcctgtctgacagacgaccggtattcaacaattcaaacatctttcatccgggttctgttacacaccaatcacaatggcccctcaaatccccatcaaagaacaagccacccgctgcgtgtcatgtcgactcaaggttgtcattgtcggcgcaggtctcgcaggcctcgggtctgcgattagttgcgcccttgctgggcatgaggtccaggtcctagaagcaacacgggaaatcaaggaggtcggcgcaggtatccagatcctacccaatagctcgcgtgtactgcaacattggggtcttgaagaggcacttacgccacacatgacctttccccgggtctgtaatttccttggatggaagggcaatccaatttcgtccatggattttcacacatcggagagtaattatcccggcacctggtatcgtgactttcatcgtgcggacctgcaaaaatgtctggttgagagagcgctcgaactgggggctaggatcacctgcaatgctcgtgtggtggatgtcactgtgagcgaggatggggccatcgctactgcttctgcgtcggatggaagacactggactggagatctcgtcattggggcagatggagtgtttggaaaattgacggaaggtttgctcggcagagtcgatccgccggtcaaaactggtgatcttgcataccgtttgctgttgtctacgaaggagatgcttaaggatcctgatctggcggaattggtaacagatccccaagtcaactattggttaggtccggatgctcatgcaggtatgtgtttctcttcctggtctgggttttgtcgttaattgtgtagtgaactatgttcttcgtagtggagaattgttcaatatggtcctacttgtccccgacgatattccagaagaatctctggcatcgacgattgaagggaatgtggaagagatgtgtgctttgttcaaagactgggatcctcggtacattctacgatgaccttcacttatggacacatggctgactataccagtatccccaaactactaaagctctgcgattccgtccagaaatggcgtctttgcatccgatttggagactttgactggactcatccctccggggcgtttgttatattaggcgacgcagttcacgctacattgccatacctggcatctgggtatgatagccttatatttacttaattccacattcactaactaccacagtgccggaatgtcattcgaggatggagcagttctaggtgaatgcctctctcgactcccgaatagccccggaatctccaaaacctcggccgagttcctgacggccaaacaacacgccctttccatcttccaggagtgtcgcaagcaacgaacgaaaatgattgtggaacggggaaatattcaacaatatctctatcacctacatgacggcgctgaacaggaagaaagagatcgcaagatgaggatggtcccaactcccgagggagaagcattggcttggcgagaccccggtttagcacccaaattgttgggatacgaccacattgcagacgtaagtaatcgtttcaccgtttcggcggctctgaagttcactgaccgtgcttaggttgatcgtcgatggggtaaatcactaggaactagtgttattgactcgagactatagtttgatatcaccattcctgtcttggtctttcttgtcattctctgctataatctgctatatttgacctacaatcatattattttagacacatatgtctttagaagtttcctcctaggttgctcgctccaattacttgacctatcttggcctatggcttgttggaagctgcctttgatccccaacacttaggaatcaagctcccaccatagtaagggagctttttgacaggggccggcgtgttcttgagactcagatgatgaaagcagcaatataaagtatgctagttactcgcagcagatattccaagttcttttgggttgtcttttcgcgtgaggtttgagtgagatctttctagatatgtgccttcttccatatcctttgttataccgtttgtcatactgtttgtcatgtcctttttcctggtcaccatttgcagctgtgtcaaactcattctgctatcctactcccctttacacccttccaaagtcggtcaccttccttcttgtcttcttcttatcttcttagcgcaacaagtaggatctattcatatctggatatctcactttgatttggacggagattttccaagcaccagggcaatattcttaaaaggtatatatcttttagcatcgggtctcagctatccattcccaatacctctttcgtgtgccttactgaccgtacttgtgcaaggacttagaacgatgtcctccgatgaagcccagaaacgggcaaaggctaccaagccgcaaaaatcaaagatttctgtatcccagcagatgataatgataggaatgagcttgtttcgcgtaagcctggattgaggaacatgaccatacacaccatcccaaaagactggtgtttatccgcctcggaagcaacagactcgcaatatgccatgcttcggtcatattctcccagagcatcctctatcaacacttttctggacgaatgtgatagccttggacttacgaatgatctcctgaacgaagctgataggatccttgatgcctctaccgaatggtcccggtttctacaactcctcggaccgaggattctgtcgatgatatggaagccacagatgacggatggccagggtcctttgcaactgccaggcgtctgcaacagcagacaatgactgttggcggggtgcgagacagagacataattcagaacacagcggtaagacctcgcagtgccatgccccattcaactcacaatcttccagaggttgaggatgaggcaatctcaaacgcggccgccataatccttctgcagacattgtcacacctcgtcaaaaccaacctagaatggattttcaatcgagttcacttttcatgcaagtttacaagcatgacgtacaatgtttacaccgacggagctttgcggtcaaagaccacgtcgaaaatatttggaatcttggaggtaaaaaaaagaatgcgcacggtgaatccagccgccatcttcgcccaagaggcctgccaggtcgcggggtggttaatggaatcatccgcagagatggctgttttcaacaaccagtaagtttgatcgcggcttaatgcttaaaccgctatgaatggctctataggattcgactaactgatcacaccccctttctagttacatgctggtttcgcaagacagacatcaattttttttgacctttgcacccttcaacgaaaactacgaaagttacttgcacaacggaactgacaccgacgtgtttctcgtcatgcacacggttggtcccttttcgacatccgacgctcgacaaatggcacaattcgggcgcatttttgtcgccgctacactggttgccaagtcggctgctgccaacattcattgaaccgttctccacgtccactgctttctcctggttgatgtaatagaccttgttcgctacctttaccaaataaaattgttctttgtgtctactgaatgaaacccaataattatatatgtcctctattgtagatagcgccgagaatatgaagcaaatgaaatcagctcctaggaaagattcattgataagttaactagaatactgagtccataagaaaggcgtctttggttcaaggtagacagttaatccttgtccgttggaagagaaaagactgaacattagaacttgattatttgcccactccctctgaatcatgtggctctgcatctagcctgggccttctgaacttccttgcccggacggatccaaacatcctcgcaagcgtatgctctttttgtgagctctgattcatgttcagcatcttttgccccatctagtacatcaagagtgcaaaccttagggatgtcgatgacaactgtgggtttgggaactgtgggcattctgggatttccgactaggtcggcggacatgaatccgagcagaatgttcatactctcgtttgcgacttcgttagtcgagaaatcaaaaagctgagtcttcttgatgactagaccatcttggctggattgggcttcgattacacgagctttcattccgccaaagactgtgatagccataatctatattaaaatcgatatatgttagtcctcaagacatataagtacttcttgagcctatacttaccggaattgtattgtactgcaagaagtcctcgttttgaagtcgtgtgatcatagcagtggtaatagtcattacctctgcccgaaacagcccttcgctaggctgctctccaatcacaatcgtgatcatgacatatgggggacgtggctgaccaccactcggtgtcttcgccacaaacatggtgttcggcgaccatcggaccgatgtccaaatagctgggtagaactcgtcggcgatgattgacgggacattattgccactatcaagcgtacgttggtctacctattgcatcgtaatggaaccatatcacttacctctccagccatctagactcttgcctaaggttaggtggaactctgtcatctcctggggggtagaactgtcggcgaaactgaaagaacatccattctagagccgaatggatatacgatgcctgggaattagcaccttcttttgagaggcgatctgtgaattcctcccatcgctcagtaagtgaggtcagtcgtctctggcagtcggggttagtaagaacaatggggggaacccatgcagcacctttgggttcaaagaaaaccggcccgtggggatcagaatatggagcataggtgtgtcttccattctcgtctatctcaagagatcgaacatcgatgtgaagagactggtaggattcggggtcgatctcgatagaggtgagactttcggccccattgtagacatcgttgatagcgttcagaacttcgctgtgagcttccaaggagtctttgatctgttggcccgcatgacgatgtaacgtgggaatctttttgggcatgctgactaggctgaagagctagaaggaaagcagaagttggaagttggagaatccaggaatggtgggtcaacaatgaccaggtgaggtgtaatggggaatgatatatgtccccgtttggcttgttccgctgatggctgaggcccccgtttccccaccacaaaggagcctcacacctcctttctgtttattagtgtctgtctctttattggagagatatctttcttctatggtcatttcaattctcctgtatcctttgccaatagcgcccggccattcttcaacctgccgaaaaggagtatggcgtgaagatctacgtcatttccaagtgcatgattcaaatccccctgatttaagctgttagctgagtatccaagacactttccaagaattaatatttgattcctgttagaatcaagacgtgagacccaacattcttaaggtgagatgtagcatagacctacgtgtaagggatattattttccccctcggtcgatcgtggggtaagccgttaggactagcgttatcgtcagggctgtagacccccatctttgatattttggagtcactaagctccacgtacctctatctagggcaaaaggtccaatttattgaaaataaaataaaataatcttatcgttcatgtttccccccattttaaatcccctcacgatacatcgatacatgtccaagagcacctatatagactttatgctcgtaatcccaatttgattcaaacgtatcatccattcaaaatgtggcggattttcagcgcaggaaccacggcaaaagaagaccctccacatggtctaccagcgtcatggtatcgctcagaagcaatgtaccaattggaaagacgggcaatcttctcgaagcgatggatgctgctcacccactccagccgtttcaagaaaccgggcgattatctctctttcacaatcgccaacttctccttcttccttatccaggaccgcgacggcacaatcaacagcttccacaacgtctgccgtcaccgcgcattccccgttgtacagtcttcctccggcactacatccatcctcagctgcaagtaccacggatggtcatacggcctgaagggcaatctcgccaaggctccgcggttcgagacagtacccgatttcgacaaaacccagcactcgctattcccaatccatgtgcacgtcgacaaagctggctttgtgtgggtcaatctgcaggccggtgagacggatgtgaaatgggaagacgattatgagaaagttgacgaggagccccggatgcaggactttgactttgccgcagaattcaagttcgaccattactgggagatggaattggacgcgaactggaagggtgtgattgagaattataatgagtgctaccattgcgctacttcgcatccgcttatcaacggcgtgtcggatctaccaaaatatcgggttgagcccaaggcccggtatatggaacatcatatcttcaataaggagggttcggatagccagtttcgacgggcgatcacgtatttctatccgacgacttctgttacggtgacgtgagtataggaaatccaaatgtgaaagtcaacaccagggctaactaagaacgaactagtgataaattcttctatatccagcgtatgatccctgtttctgctacctcgagcaagatcgaaaatgaggtttaccgtcaccgggatgccacagatgaagaatttgagaatatcaacgcgttttacaggcaggttctcgacgaggacaaggagctttgtgttggaacgcaggagaacctcaatgcaggggtctttaccaatggcgaactacaccctagcaaagagaaggtaaatcgaactgtgacagtgctaatacagcggctaaccgcgacattagggccccatacactttcaaagcagcgtcagacaaatggtcatagaacaccggaaaaatgaggaaaagcaaggaggatccgagatttggccggccaccccgaaccctcagttctcgaagggttcagcagaagatgagagcttttgttcgcagttggatgcttctagttgtatggccaaaccagaactggcctggtagccagatacacatgtacctgggcgaaatgcaaggctgaacgtggaactgcttacagtcaattaccaattaggaactatttcatacttcgcactttagactagtcggggagatccccagataccgaatcaaagaaaaaatacaagcaggactgtatcatgaattcgctaaataatacccacaggcgaagataacttagttattcaatccaagagggttatcccctgtctgcttctggcccccaacactagaaacaccgttctgtacgccctgtccagcgcccttcgccgtattgccgacaccctctgttgcgcctgacacggtctgtccaaggcctgatgttgcgttgcccacggttgagccgagaccgccgactgtgccgcctactgtatttgtcacgccgccgactgtcttgcccaaggtatcgcctaggccgccgaggagtccagctatggatatttgtcagttggggtgggattttgatggttggttattgggaacgtacggttctgttcgttggacatggtgattatgtggaagaggctgtgtggtttgagtgacttgtgtggtatggagtgtgtaactgaaatagttgaatgtgtgtcaagtgttttgatcttgatgtagtgagatggtaggcatcgctgtctttatttatatcaccgccctgaaactggttacatagccatgacagccatcttgaggctaatatcttgaatgtatccatctgacgtactgacgtaccccatatcccccgcagtgtagataataggatgttattattggttgatattcgccgatcacatgggtacttattgtccgattaattgtttcaagaaagtctgttatattaaaagaatgtggcgaatggtggatgactggttggttattgttggtcttgtttgcaagggtatgatgtcatttttcgttcggacctggccaggagattttatattaactgtagctggatgatctcattcccgacggaattcttgtctgcagaggtaaattggtgcgtatcatgaaggctattacgacgtacatagaaggacaagattgtaaataacccatcgtgtccaacaaaggaatacatcgtcatacctatttacagactcgcctttccgcgagactcatatggcatgaacaacacaagaattcccgctgcgaggaacagcgccccgctaacataaacaggagcagcggttgtgagatcagcaaacattgcaataataggagccatgatgccaaagatccggttcgcagacgcggtcaatgcgttgcccgtaccacggtccttggtgagaaagatctcgggggtatatgcatataaaacggcatacatgagactactcatgaaattaaaggcgcagttccagcctagcagagcatttgatgtggtagctgttgttgacgcaagaagaaaggctccagttatagccgttgaactagagagagcacccttgcggccaaagcgtggcagttcaaccagcactccaccgagcagacagcctgggatgcccataacggcaataatcaatgaattccgatacgtgatatatgtcgatccgtcaccaaattcagcgcctctggactgctggatgtatggaaggaatgcattgtatagtggaaagccgagaccgatgaatgcccaaacgaggatgatcgaggttgtagcccatgctcgttttggggtatcgaaaagagcgcggagatgatcaaaccgcacggtttctaggcgttggcggacgatgtttgccgcgctgaaattctgtatctcgccctggtcccaggcgtccagatcggttctcgatagatcagagacttttccatttcttcgagcaacttcgtggacaacctccacagcctgttcgttcctccccttccccatgaggtattttggcgactcaaaaaccgtgaaaaacacaaaccgaccgacgaacatgatcattgcgatgccacccattgcgataataaaccatcgccatcccatgttttcggctttcgtacatccttctgcagaaccacaagtcctatacccaagcagcggccaaccaatcaaagtggcgacgacctgggccaaagcccagtcaatcgataagatagtcaacaggtactgatgagatccaggtaagaactcgagaaagatggccgagtccacgggcagattcccaccgacgccaacagaccacaaagccgcaaaagtacaaacggccgcgaaattaggcgatcccgccgcaaccaggccaaacaccgccgtgattccgatcgtcaagttgaacgcccatctgcgaccgaagacgtcgcatccaaatccccaaaacacagcaccgaccagcaacccgatgttttgcgcaagtgtcaaaagcggtgctttcgaggggtgaaattcgtttgagactgcggggaggatcagggacgtaacaatcggccacaagttatcgctcgcccagccgaatccgatcaccacaaagagctgccattggtatcggcccatgccgatcgtctgaatcgcttggtttagaacctcagctttggctttgtagttcgcgtcgggaccttcattttgagggacagctgggccctcgatcgccgttggctcaaggccaggcaatttggtcacttccggcatgttctgttgacaaagggaaggaggtaggaacgcagatggaaggggggcacacggcttatactataactgtccgcattctcgctctggcccccgctcgggtcgaaaattccatgcgtctaatcatatcccatgcagtagcttccacatcaactttattcaggggtctccttctttttccatcgacttggattggatggttttatggcgtgatggatggctagttttgtgtcagagtcagcgagaggaggttgtggcaatgccgtatgagctccgtggaggtttgacgagtcttcgggctttggcctcttcgcgtctcttttccgcctgaaggaacagtgcgtagtaacctaaggaggtcttatcggccatggatcttccaggggaataacgcctcgagataatacgaacccgatcgttgcttcatccggaaactattgtcaaccgatcacggctcccggcaggaggtaataaataatatagaaaagatgcctgctattccctaaatcgttgatccgctggtatttttttccgctccgagacaaagttgtgtcaccatgcatatataactattccacaacctgatacaacctgtagaactcgtaagtcccgaacacaaatggatcgcctgtcgcgtgtatgagtcttcaattagtcggattccataatgcttctgcaagataggtgacattcttatgatgcgtgcagtttgcgtgaagctgactgcacaaacgcgagctgacaggatcagcagcgctaatcttacatccggaaggctgactgcatttgccaggggtgccggaatacccaattagggttagccttgaaacaataccaattccagtccagatcgaattatacctcatatattccataaaccacctcgagtacttgagattgatttctcaacgtctccacgtggttcgtgaattgctgttggcaaaagagtatgctttatgacgttagatacgaagtctaaaatattgaaatacccctatggaacacttaccatgctgtggaaattctaatcagtccctattaccgttttagcctactatagaacatagccaaggcaaagcacttgagttgtcctgcatctaatataaccgtttaagcatgtctagcctgtaacatagtattgtccactgatattcaggcccgatggaagttgtacaatatggggccaaatcaatatctgagtaaattgtgtaaagagtgactagtaacatgatgattcgaagtttaaacttagatttgattgaattccaaaacgtagccagcaaattggttgaatccctccaaactgtccacatagttcagtcggaaaattcatcgaacccaatctagtcccattgtcagcacactcgctgttctcatcctagcatttagctccgccctcggtgccaccgtggcacgagtttgtgtggcagtcttgaacctctgtccactttccacctttgcactcgaccttttcacaaaaatatacattagcaaacatgaaacactattggaacctggacatgttgacatacaataccggtcctgtcacagccacagaagtgtctgtctccgtttgatgcctggcaagggctgtttgtacgtctttgggcgggatcatagccgcttccgcaggtgtcccgcttgtccaggaccgaagcattgacggcggtagcagccataagagtgaagaggatagcggtaaccttcattgtaaaagaagtgttttatatcaaaaaaagtggttgtgtgtctgaggaggttgattagaggcttgatgtccaagagtatgagtttctggaggatattgagacgtatatatacatttccagaacaaatgccaagtcgtatggatttcataccatggacagtttattcagattcttggagttggacgcctcgtgtgccaagtgccaaaagtatacctcgaagccagcaattggtcctggggttgaggttgaggttgcattgcaggaaattgaccagacgactctttcaggcccccgagctgaaaatgaaacgcctcaaagagatgtgtattatttactagaatagtagactatctatgtagatcaatcttggctgtttggggatacgatgagcatttgtgagaatcatccctacttgagcctatgcatataagcataacataccatcgggcccagaaacagcagtgccaaactggattgtccatagtaaaccgggatggactaagcaaccaatagcaaatagtggcccattgaagacatatagaatgtggtatagcttgaaaaacgatgatcaaattccgaaattccgaaattgaatttacaaccgcaaacccaattatacatcaaattaggtatatcatgtatagagcggccaggttctcgaataaaatacccaagaactaggagctagcgctctagccctggggatatgcaagaagacagacgaatctaatagatagtatcacatatattaattggttatacaaccagtatcacataactcgttaacctcacaaattggacttgtcgcatgactagaggctatcagatcacctctttcggctataaggggttcgtaaaccaaacctagggttacatcttcctacatgcatttttggctctttggcatttttggctttttcgcgggagggcggaccacgggagatccacacgccgccttttgaagagaccctttgcatgtccaaatggtaattgtgtatctttctttctggttcataggtaacagatacttacaatgaacagtgaattcctcgggattgcggtctgatagcaattatttcaaggggataggtatagcgactccctcttcagtactcaatttaacatgttctttgtcatggtgtgaatggtttgcctacatctgcaggtgcatggcccgagtgccagttgtgccttcatgcctgacttttgcctacttcctgaccacttgaatgtactgtaaatcatcgtaatatgaaggtcttttgtaatataccaatatcaggcagtaagacatcactatttaccggaaatggaggttagcccctggcatctagaccgctgcttactacagcccaggaggccgtagccccaggtcacgctcttgcaaccttggaatgttcaggtgagcattggagttcagcccaagtatgagacctaataaggcaaagtgactcgaactgtcttgtccatgtccgaggcaagccacccacatgatctggcaacgaggctgactacacccctctacgatgatctcacaagatttactacgtcagttcaaagttcaaggtgtttattgtcccggctatatacgcgaacaaaacctagtctccacagctaaagcaagccggttgtgcatttcggcagcagtgagtcctcgtatcacagaagaaacccgctactcaagccaaccgccatgtgtaaaatcacttgttcggactccggtcctcctccccatcatatccaagatgacatcttagatcatgagacgctcgacttggttcttgatggcgcggatctgggcggtcaggtcactggcctcgttggtagtgatggaggcagcaatcacgggacgggagacaccagtagcacggccaagagccatcttactgggaacgtaaacgtagggaacctaatttgaatgattagttttgtttatctggtgtagcgccctagggtatgggctctaggatattggactcacgttcttgtcctcggccaaaagaggcaagtgaagcacaatggcgagagggctggtatcggcggccatgatgacaagttccgaggttccgcggttaagggacttggtgcactcgtttgcgcccttcttcaattgacgatagtgcgccgcctgctgcacaagatcaagaaggctctgggcgagggcctcatcggcgatgggccacgctgcgctagtatcttcggccattgttgcgttgtagttgggaatttaaacaccagatcttgaagaaatggctcactcgggggatcacggccgtgtagttgaaacggaagataagtggaatgtagattgaggttaagttggagatgatcgtgggaaattttttgagagcggatcgtttggacacaccgcctactgaatttgcaagtatttctgcaactggttggcgctcaccgcccttgtttaattggccaccccagatatcccgccacccaggatgtctgcgccgaaatctttttcgaacccctacaatgtccacaggaataccacaattactcagtgatctgttagtagttacgccaaatctttctacatttcctcacttagatgtcctacaggcaataaatgactgcacaatcttaggcggtcctctcgcactgatcacatcaacaaactactcgagaaatcacaggtcttttcgtatcgttgtcaatatttcttgaaggcctcaaacccttaattcgtatgcaaatctatgaatctagtatcttgatatgctaattgtacagaaaatacccagccgcttaattggtgccgttcacagtggcagaggcaagtctagagcgcgcacgcagtgcagggccaaacttatacagaatgaacggaataaacgtcaagaccgtcgccaccaatgccaatatcaacccagcgtactgactacccacgttgtggaagaactgggaagcaaacaaaggcgacacagcaccgagtgtgttgcgcatgaaaccctgaccagcaatggcagaagaagagtgttctccgtaacaatcggccgtataactgtagcaggactcgaaaatgaagaagataccgatggtgatgagagccaatccgacgattggacccatccagtggagacccttgtactgggtgaagctgtagacaaataatccgatcggcagccagacggctccccataggacaccatacagccgatcttcgggtgagacctcaacgttcggattggaggcaatggagttgtatttgcgaatttgcaagaagtggaacccgaagccgatggtggttccgaggcagagagaaatatagggaagacctccgactccttcgccccagccgcgcttctcttcgaaggtaattggaatgacggacaggaagaggaaggccaggaaccaggcgaaactgatccaaagaccgaaggcaaagacgacgggctcggtgaagagcatcttcacggccttaacagaggagttgtgtaacatgtgtttgagcccaggggcttcgatatcattgaaggtcacgaaattgtcattgccggtggcctggcggattgccttcgcacgtttgcttaggcatacactaccacgggtttcgggcaggcaaaaaatgatgataataccaagggggatgttcgccaaaccctggataccctcgagccagcgccagccgagagcctggtcgataaatccggcgtagatgggcgcaccgactgtaccgagaatggcaataaaggagaaacaagccatcgggatagcacggtggtccggtatatacatatcaccgaaagtgccaccaacaagaattgtaccaacacaaccaaacaaacccagcagagcacgacatactaggattgtggcgatgttcttaccgagagcgagaccgatgaacataagacaaaagcaaacgtaggcaccgacatagacaactcgtcgaccggccagctcgcagaagggagcgaggaaaagaggagcaagtgcacatgtaaagttgaaggtgaaaagaccaagctttccaatttcttctgttgtccctagatccgctgccatgcgtgaaattccggaactgtatgctgttgtggcgagaccgatgaaaagtgtcatgaggcaaagctgactgctgatgaaggcctttcggcctatactccagttgaaggggttctgtttgtctccatccacgaagtccagcacgatgtattctcggccatcgtgctgcacaggccttgttgctgtaaggggaagatccacgtccacctcttgcaataagctgctgtcgtaatgctgggtctgctcttctgaaagttcattccggtactttccaccgacgattagaccctttgccgtgtgtgtctcgtcggctgacatagtgtcaactgagggaatattctcgtcatgggaagctgatataggttgaggatttttggaggccttcatattgacatagattgtggagagtgaaggttggaaaagctgtctaggggagaatcaacagcatggggtttggtccctttctataatttttaagtgttcctggctgaaagtcgcgtgatgtgagtggtgctccagactccagaatttgatgagaaccggggctgcgggattatacggagagtggggaagggaattccaggtaatgatcaattattatgctgccaacacggagaacaatgaagaacctgctgatcaatgaatgggttggaataccaagtaagtgggtatgacgaagactacgtaaaaatgctagtagcggggcgcttttcgtcgtcgtatgttggatacatacagtcagtccggtcactggggaaagtctcataacaagtctcataacaatgctgtctccaattctcgctcgtgatatgctattctccttcgcccactctcgtgcgtcagcatcagggcatgcttatgatgcgtatagatatctccggaacgaaaggattcatgtctcggatgattgccggtgtttgagttttccctatatcgccgacgatggtccgaataacctcccgagccgagttagctccacaattcaaagttattgtcggcatgccggttttgactcggattagatgcccgagtgacggaaaaaggtgtgataaagttcagcaaagaccagttgttgtgttataataactcattgaagatacatctatcctaactgaacttataagtgaagttataacaattcacacatgaactattgagccgcgcagtgacccactcgccacctgttccttcccagtgaactttccggtgagtcctattgcagtaggatttccgagatttgccccgtacctatgcatctaaacgatcatttccaataatatcatgtgcctggatcggtgtttcttcgccttccccaccagactcatgtttccccgcctaactctccggcttagctgtctaccggctgatccggtcatattgtcagggatcgttccccttcccacgtcatggtacgtagtacatggctcctcgaaggctagtaacctttatgcaatctttatgcagtatctcccattgtaacccctcaacttgccctgtcctggcaagaaccatacgcccaaacgctgtacacctattatatcgctgagggaatttcgacacctatctcatctcaacccttctaccagctcaccattgcttggcgtcgcaataccaaactttttccacctacatagtactcatatttaaacatcacttctgtgttccaaccaatctgaaaatcccacgcaatcaagcacgtagtttaaaatgtcttatataggatataggatagcatccattttagcctcaagcttattggccgcagaacgctcgctgagatctgacacgtgttgtaataccggaagagcacaaaccacattggatatctctgttaagatcgcacggcgagtctgtttaaagcacatactttattgtagaatgcgttggtagcaagcttctcgagagtgcttcggtgtaggtatagatagtgttgagagggagtgatgccgacggcgctcagtcggatggaggaataagccttgggcgacctgctgtcttggaggaagagaatagtcgattgaggagttagccgatgtttgagtttatggaacgcggaggttgtcttcgccttcatagccagtggaaccagcttccatcgcaaagcttaccgaattatatcctccatgaatgctcgattatctcacctgaccggttcaagtaaggtctcatctccaatatagcagtatgcatcgcgaagggaggctcggtgacaacggacggtgacggaaggaaatgaatgtgacttatgaggtgaactctgaacttttccgtgtcgctgccgcccagttgttagaattccggacgaagttagcatactcgacgttgtagaataacctgagggggtatcagggaagtcattaaaagaatttggaagtccggggtaaggtgtccaagctggtcatagttccacggtcagtaggggtacaatgtgtacatatagcaatacccacagtcaactccacggttctgcaacgcttttagattctttggggaaaatgtttataatttcgtacttttagccagattcaaaacattcaacacagttaaatcatttatccaatctaagataatgctatattagttgcccaagtcaagtatattccaccaatcagcatgttagctcaggggaagagcgccgggctcataacccggaggtacgtttcaccgaacccaatttgactcacgaacgtcannnnnnnnnnnnnnnnnnnnnnnnnnnnnnnnnnnnnnnnnnnnnnnnnnnnnnnnnnnnnnnnnnnnnnnnnnnnnnnnnnnnnnnnnnnnnnnnnnnnnnnnnnnnnnnnnnnnnnnnnnnnnnnnnnnnnnnnnnnnnnnnnnnnnnnnnnnnnnnnnnnnnnnnnnnnnnnnnnnnnnnnnnnnnnnnnnnnnnnnnnnnnnnnnatgctatgtctatttttttttttttttgccctctcttattgtcctcattcctttcttttaaaggtccttttttgctaatacatcaagcatgtcatatgtgggggaattatttgaaagtccaatcgtcgtgatcacccatgcagcattccaagttaagaagtcttcatgacatcagtaaccccaactaggtatcattttgatcaccacgcaatagccctggggctacgattccctaggtctgtatgagatcgttaagaatatcatgacatacttgactccccgatatagcctcacatgcaaggctctttcattcatctaaaagatgcctggactttgtcctgcctgagagcatcatactgatgtaatctatgggttcaatttacactagtataaatatctgattgaccatgacccagacggaagtcaatgtaaggcttttcagttctctactattttggaaaagatgacggaccctaattcagaacaccaccttcacaggtaaggcatcaatcccatcccaaccggtatcatgatgctcacattcacaaggtacggcaactggatgccagcagactacaaagctcaccaagaatggctggggggaataatcaagaaagtcgacgacgagtctcagaaacccctccacccggtcctagaggaattcagacaactcatcgaatcgaacactcgcatatacatgctcttgacttcaatgttcaaggaagtcccacggaagaagcgatacggccacgacgtaacgggaaaccctgaaatccgcgactataaccatttcctgcgtgttctcaaccatctcctcaccactgcgccttcctggaccgacaaggcaaaccgcgtcgggctagtcggtttgcctattaatgccgtcctcgactggccgatgggtacacctagtggatatgcggccttcctagatcccgagatcaacgcgatgatcaagaagatcttgaatgtgtggggcgaattcctgcgctctcccgcttccgccgatgtgctgaataacacctctcacggatggttcggtaagactggccgtcgggatcttacagctgttgcaaagatcggtccgctagcgcagacggaactggaattccatgacatgtttgaatgtgacccatatgctccaaatcacggcttcaagtcatgggatgacttcttcacccgcaccctcagggagggaatacgccccgtcgcagatccggaggacggaaaggttatcgctaacgcgtgcgagtcgaggccgtataggattgcgcaccatgttaaagtgcgtgaccacttctggatcaagagccagccctactctgtgctcgatatgctgggccatgatgaacttgcgtcgcagtttgttggcggcactatttatcaggcattccttagtgcgttaagttatcaccgttggcacgcgcctgttagtgggaaggttgtcaaggcctatgttgttaacggcacttactattccgaaccgttgttcgaaggtgttgggaacccggatgttgagcagaaggatattgacatggcaggtcaggtcacttcgcagggatacatcacttcaaccgccacgcgagcactcattttcatcgaagcggatgagccagccattgggttggtggcattcattggagttggaatggcagaggtctccacctgtgatatcaccgtcaaggagggcgataaattgaagaagggagatgaaattggcatgttccattttggtggttcgacacattgtcttcttttccgaaagggtgtccatgtctctggcttcccagagcccggactggcagagaacaagcctgttcgaagcaaactagcagtcgtctcgtgaggaacagaatttaatgctcgaattgcccatatttcgggtagaaaagttggacttcaataaagatcagtatattttcctgcatttatggtaaatatatctccagtatttaaaaccatcggcagcctcataaagaacgagccaacgagttttctgcacaatagactgcgtaattcatcgtttactgaatataacatcaagtaaagctgcttcacttccagattttcgattcgatttactacaagcgttttggctctgggagcagtggaaacaggaaaagcacgtgatctatcatattgtcagcggttgctccagcgacaatctcggggatactattcccaacaacattagctacttatcgcgagtctttcagggaaaaatagggtcaactttgcagcagacaatgttgcgtttaactcgccccgatgtctgccgggaaaacccccgcgatcttgtcttgggtcgaagaagttgcgaggagcgtgcccgaaaccccgcctaataccgaaagactggtggaaaacgcttcaactccagcatctcagcacaaacgcaagaggtcggtgtttgaagccgagaatccgatgtcgcagtcagaccctcataagatatcctaccgaactacctctgaaacagcatccaccgtttccgtccgcttagctgacgagataatctctctggccccatcaagttccgcggccagtcggggtggtgggcgatcacgctcatcgagtccatcacgcgtgaaggctgaactagccacagccatccctcgggtggtctatatacatgaatccgccgaccctaaaagccgtgctgcgagtcagctactagcagatttaacacaagattctgagttcagtggaaatgaagatgttgctcagaaaatctcgagtgcttcgtgtcaatgtgccacagaattccgtagcgaaggctcttgggtgcataaggtagcactgccgctattggagagcgctattgcagaactaccgttggagtgttggagcatgtatgtcccacgaagaccccgtatccccctggttcttgctaatttctggcagtcaaacagagtccgttgacccccagtatcaacctcgttatacagcccgcgatacatataaccgaaaaattgatctggttgtcggtcttcccgtgaacgcttacgaagttcaatatgaaaaggccgggttgcatacgacagggaaatacttcagccatatgacccatccgcacactggaaaacgtgttctgggtcctggtgttgaaattaaagccgcagatggaaatttggtggaagcgcaagtccagattggggtatggatgacaggacttctaatgtgggcattcgcacagcgtaagagtgtcaaagatttgcctccccttgttgggtgcactgctgttggagaagactggaaattttatattgcaaccggagtcgaagagtcgggtgtcttgaaagaagtagtaggtaatatgcttcagtgacttgggtacaatggctaatttcttctcctacagcgcatctggggccctttatctgacttagacggccgtaccacaagtgtgaaacataccacgtctcttttaggaactcttcgtcgagtcatggagtacacaatcgggcagtacaaggaagggattttccgagcaatcccttccgtggtttaaaagctacatggccattgcaaaaattcgtcaaataacgaatttcacgaatttttttatccccacgcctcgaatttgcttgatatctggaagatctgcaaagtataacgcatgcagcctgtgatgtcatactaaacgaacggggttctacgccattttgaagcatccgtcggcttcactcgttggaatttaatttcgggatggagtccaagtttgcgatactcgcgttttgtttgcttttgagccatggcttggctgaacaacgccatccccatgctggatctcttggcgatcttcgcgtattgcactacaacaacctcggtccccagaacaatggcacttcagctattttagcacacgatcgctcgagctatttcgatgctgttgcaaagtgcattgccataggggagaagctcttcccgtggtcttcgagtgaaagcaatagtcaaattcactccgaactcggttatgaactagactatctcatctttgcaaaagaaatacgagatgatgactacttttggctgtcggaggaagaaaatcgcaaattatgttctgctttctcgatcgcccatcgcaagatcatacagaaaccatgcaatgtgaagctaccagccctctgtacctcaagtccgcccggaacaaccgatcgcgaccgagccgtaagggaaaccacgaaactgaccgtcacatcccacgattataccctaaccggatatcgagatgcgcgttccttccgcttcctcggggtgcccttcgcgagtcccccaattaatgacttgcgctttgccccaccgcaagcctacaccggatcgaacaacatcgatgcgactagcatggggaattcatgcatccaatctgcttcagcccttagcactgtgtctattggtggaatgtctgaggactgcctttacttgaatgtcttcaccccattcctgcctcacaatatcaccaagaacaccgcccttcgccccgtggctgtttatctgtatgggggtgcattcacgaaaggtaccgcagctatgattgactatgacggaggaaacttcgccagccgcagcgatgtggtcgtcgtcacagttaactatcggcttggagcattggggtttttgtctacagggaagctgacaactgggagctacggtattcaagaccaaatcatggctttgcaatgggtacaaaagcacatttctgccttgggaggtgatccatcgcatgttactgtcttcgggcagtcatctggtggtcaaagcgtggtagctctgctctcttccagcgcagcgaaaggtctcttctccggcgcgctggtgcaatcagcaaacttcgacctgccatggtttcctcgcgctctttattctaaatacatcgctccagaagtcggaaacgcagttggatgtgacggaaacgccccagaagcaaccctcctcaactgccttcgttccgtcccggcttcaatgtatcttgataactcaactgatttccagactgctacaaagtccttctcatccaacaaggcaaatcacttctaccataatacagaactgctatccgcaagtgaaccgttcatgccgatggtagatgacaccggatcaggcgttatcgacgaccaatttaacatcctcctctccaagaacaagctcccaatcaacgtcccgaccatgttcaccaatgtccgcgacgaagcaagcctctacatggccattttcggctcgacccagagcccactcgctacattgcttagcgttatattcggcgataccctcgctcggaaaataatatcctctggggcatacaaggttaatgattccgatcacgatgccgtcttaaacgctgcttccgatgcagtatcgcacagtcagtggacttgcccacagggctatcttctcgagaattccatttccatctttcctgtcctataccaagtccaaatagcagatggtcatgcagagacatcaaatatgccgggcatctgttacccgaatactgcgtacaatgcttcctgccatacctcagatgtcttgctcgcgtggggtaccctgaacaccaagacgcaagatgtgtatccgtactacgatgatttggatattcttcactcacagcttgttcatgatgtattcggtgcgtttttccgcgaaagaaacccaaatccggatctggagttcttgaagatccgtggtcctgcgtatgcaagtactctctctatatttggtggagagtcggttggttcgaactcttcgtttgggcgttctgagaagcggtttcttattgaggagtatacggcttcaacacgaaatatgacgcttttgggaatgccgccgtctactacggccaattttgaggacgaggagatttgtgctgtgctgcgcgattatggttttactttccagagggcgcggctgtcggattagattcacgttgaattcggtttgggttattaactaaatcgctacaatgaacgattcttgaacatttagtttcagatatatatgatgcacattcaagttcaagttcatattcgtgtgcgttgatctacttgagcttgtcattccatactcattcaaatggggagtatcataggtgcaattaagcgagaaaaaccacaagaaacaaaacgccaattaaagaagtccgccagacataagaatggaatgctaggttcgtcgtgaaaaagatgagtcgccaaaggcaaaatgttgtgatagagccgatgaaaaccaaatatccatatgcccgaaaatgaagaaaaaatgaaagagattcgttaaacatcaacgtgcagcaagtcgtgagaattattcgtaaatcggaaccctccgtgaggggatgtatccgtcatcttcaggaacagtggcaggaggatatcgctttgaaggggagctgcgagggctcgcccatccagttgtacgggggtggaatccagcactgctgtatgatcgcggccgctcagatccgcttcctccgctactgggtcgactattacctgtacttccgccactataacttcctcttctcatatcatctgcggcgtgagtccctcgatgtctcggtactgctcttggcggaggagttggtggcctgtagaaaggtgggtctggagcagctggagcaggagttgagtcaccgaatatgaattcgcggaatttgacacccgctgtgcgcgatcgagaacggtcctttgaatgttcctttcggaaatctctcggatccctatcccgatgatctctcgggtgaaacttcgatgaaggctcagagtgggatttactagatcgtgaagggtaagtctcatacccgcggcgatttcgggtagggcttatcggtgacagatctcggaatggcctgcgagtgtaggcttcgtgggagtgacgtctggcattactgctagaaggtggtgagagatgccgtcgggtttggtgcttattcggttccgcacggtccttgcggcggcgtgcagactcatctgaagacacatcagagacatttggaatatcacctgttcctgggcttagtggatggccgtgccgagcaccttggtctcgtccgcttgaatagggcggacgctccccccatgggggaggggatgaaactctcggggtcgaaaagcccggtcgactcgctctaggcctgcgtgtagagaatgcgggatattctccactatatcgtcggcggtgattgcgatgatcggtgggccgatcgggctccgcatgactgtggcgctttgacgccgcccggcctgaacgcgagaaatagtcgtcttcgtcgggcagaggatccttgccactaaaatggtaatgatatgtcccaaagtctggcggcgaagcacgcttcgtgtgtcttttcagatagtcacgctccaatcgccgactcacgccttcatgccattcaagcatctccgggtcaggctcagaaggaaacgcgtctcgagggatcgtcttgggaaagatctcgccatttgcatctacaatatcccaaaggctgactgcattctgcaaatacactgagtgttcatctgggtccatcaacagttgtattgtctgccaccgcacgaagccagtcggaagtagcgagggaattgatgggggttcgtaagggttggctgagggttggagactgtggaaacatcctagtgactggtagatgaatgacagggcttgtgccttggtctcaaggaataaagggtcgtagttgccgccgaccttgcggtaaaaagtagcaagtcgatccggggtgatatcagtggtggcgttggtatcgaaggagcactttgggtgtgttattttggtatccaatccacttcagatgggtctagaacttaccatcaactgcgctatccctagacatagctgttctagcagcggggctgggcttttgtctgaattgatcagcgttccccagttaatatctgcaaaagccatgaatgtggggtatgagatattgagaagtgcatgcaagccgactcattaaagcatttcatctcacaggcttcgaggttgggcgcatgtcaagagagaggtgacagcgaagaggaagagagcggtcaggcacacacgggacccactgcggggaaccaaaggaatgcgaagtatggaagggatatgagtgaagtatatagaatacaaagaacaatgaagatacttaactattagaagatgtctgatatctccatgagttgcacggctgagaatacatgtgacttgatgtcacgatatccgtgactcatatacatacgctgcatgactgtgaagcctgatgtggcgctgtagatctgacccaatcaccaaaagatctcaattaagggacaataataccctacgctaaactactttaggtaaggtgtatctagatccattggattagacgaaattggttttgagctgagattttgagctgggattttgtgctatggacttgcggctaattatctgttgtaatccttcctggtaccctcgctaaacagtacttgactatcatgacatgaaaggctttaatgaccacgatgtaggccttcccaaggagcccatgacaatgaaccaccgttgttgcgaccatctccttgccttctctattattgtccttatagcccgttggaaaatgctaatctcgtgtcagaattgaaatctgaaagttgagatgactgtcagcctcccccaagacaatctcgttctccgcgcgcgagatgacaggaaatactgtaatagtatcgatgccttttttctcggccgctgcctgtatctccgtggagcgcttcacgccaaagattgacataactccatctctaatccgcatcaggactgaaaaccagacaggttgtctcgcaaagaaaagcccgcgcaagggcatctgggctgtattctccagacttgggtactggaagggacacagcaaatgcgtcaacaaaataagctgatttatatgacgatggcaacctgctttcacttggaaaggagacggcacgaacgggtgctggtagcatttttccttgcgctgagctagtgtgtaaagaagacgagattgggatataaagaagcgagtgagagcgcggtcgagtttgtgctatggcgacgcgaagctttgtttgaccaacaagccgtggaaatgaaagcattaagttatgtggcttatgtatcaacatggctatgaagacgatcgaagggatgacaaccgttttatcgagggtatgatccgtctagtagtctccgagggtacccgaatagttgcccgtaaacatccgtattgaagaggggaccctgccacggggacaggggcaccgacagccctgcctgcaaaacaggtgtgagagcagagtattcactgggagtattaggttgctagagaggagaacaccatggggtgactaccgagaagagaggtggaaaggtgtctgcgttgctatctatgcctcgggagtgcttttatatcacatagccgcttagtcatcctgctctgggaacccccactgcaatataaagtgcaggtacctgattggcccaaggggccatatgaaaaaatcaatagacattgggacgaggtgtcaaggcctaagcgggacgaaaaggcatacacacgagtaactagtcaggggcagacatcttagtatcttcaaaactgcagtgggggtttccagagtaggatgactaatcggccatgtgatatgaaagcacctccgaggcatagatagcaatgcagacactagacaccagacaccagacaccttcacttcccagtagtcaccccatgatgttctcctctctagcaccctactactcccagtgaatactctgctctcacacctgttttgcaggcagggctgtcggtgcctctcaggggtcccctcttcaatatgtaaattaataaaaagtatgctaagtcctctttctgtagaacttgctgaaaataattgatatctcagaccccgtttctgtaactttcattgcaatttcagacaaatatagtaaactaaggagaggtcattcagtctaaactcccgaactgatgcccaaatctctataaaatgccctcaaatcgggttgtcgaccaaggaattctgccattgtcgtgttctcattttgactgcctcctttttctagagccaagtgcctgaatcgtctcattggggtgtgattcaatggatttgtttggaaataggattgaaatatatcgaccgaataaattcgcgagctggaaagtgttaatatgagcaaaatcatagacttgaaagccagcgagaccaaatatcttactatatgtatccgtaatacctagcatcatagcctgagacaagatgaccgaagtttgcgtatccatgcccccagtcatccttttcatcgcgcacacaggagctattcaaaccaacgacttggcgctggaggcgattgtacagctttgagatggaggtggtgttaagggcttctgaatcgccgatttgatgcactgccatgtcaaaggttgcgaaatggatttgttgcaaggttgagaggacgcgatgtgatctttttgcgttaatgaaattttggagcaatgagaatggagatatcgatgatgtagaggtattgacattgttattatgcgtaggtcgggtggtggaaggagacaaaagagaaggcgagctgatagaatgcagtatggactcttcccaacaccagctttcgagtaataggctagggatctcgacaaagtccctcgccaccctagtgccatggaaacgagagaacgtggtttttgacaccaagttgtgaacagcatgtccaaattcatggaatagagcaatcagatcatcgaattgtagattggcttggttgctgatggtaggtcttgcaaaattactgaggattgcagtaacaggataccacctggttccgtttgcgaaagtgaagccaggctggaggagaaagttggcgacacgaccaccgaactttcctgccctcgaaaagagatctagatagagataacccagaaagggctctgtacagttgactgcgtcactgtcatcccaaactgcgaataatcggacgtcctcatgccagacaatcccattccgatctttcgactcggttatcccttcaaatctgattccgaatagccttgctaccatctgcataacacgccgtagaacatgttctaaagggaagtacgccgataccagtgcgtcaatattggtgtgagcatctttgttcgcttgcaagcggctgtagaagtggtggtcccataactgataagagtcactaaaggtctctgacatttcctccagatgaatccgtttgacctccttcaaaaaggcaatctcttcctgtccggcagcattgagatcttgcttcagggcccagagcaatttatccacatcgcggaacgatctcaccatattgcctaccaaggcaccgtctgcatgattctgaaatcctgctatcctggccgcatcattgcgtaaattgacaatttctgcaaatattgccgcattctcgtgattcttgttctcatttgccacgtacaccctctcccgtgtgtgtgatcccgtcgcagatcgcagcacaagcgagacctccgctcgtcccaagggtatcttgaacaaattatcacctttagaatccgattccaacttccagatggaaagccactcatccgatacaccttccagctctgctctgctaaattccagcgtcggtggtggatgcttcagattctcctcatacgcatattggagttcgctgagccgtgtctgaatttggttatattttgtctgttctgatgggttcagatgaagaccatgttgtcgaaaacatctcaaccgatcatcaagaaaatgctgctgctctgggaggagggtctgtcccctttgcgctacagcggagacgagtctgaagatgccgctatgttggcaagattgcctttcgaagctctctatcatcttcatggactcaatagaagcgttgtgcacatatgtgttgctcgtcacggacttatagaatccaacaatatggtatctgagtccgcacagattttcaaggtttgctatgggcagcaagacgttctcgaacgtggctttcgtttcattgacatcttgttcaagggaattatataattctctgctcgtctcaatacaatattgaatgtcttccatgatggatgatggggttcctagaaaggaaggtggcgcctgtggcggcctgcattgcacatttgctgacggctcatggaatggagtggaattcttggaatcggatattgcttcacctgcagacgctttggcaagttcggatgatagggttgaaaattcttcggcccaaatatagaatagagcggtggttagaaatattatgccgccgaagaagatgaacgagacgcgaagcggcggagccattagactgagttgtgaacgacaagaagatatggttcatggcaaataggaatgaatataggggtcttcatttgattgtgagcatctgtgttcaaatgttttgcttagactgtcacatcataggctcccgaggtcgggccagactaatgcatgattacatccttagtgccccatagggtaatcaaccttggaagttgcatgaatgattacccgtaatcaagtaacaccagttgacggaaatatatagtacgacaaatgtaaggctaccttcggtggtgactaagtaaaactaacgggttgacgaattgtagcgcgtagggtcgttttggcctaattgaggctcgaagaaaagtaaggatttctgaattaccattgcagagagcttaataatccgccagccttaactaactagattggcaaaatggagcttttggcgccatagaagttcacacatcactactttttggggtggtaatatatgaatctttcatgttcatggggtcatcgggcctggtattgttacgagccaattcgattcagaagaaaaaagtgcaattcaaaccaaattctaagtacgaagaagaaaggaaaaagagaaactatctgagtgcgcgttctccccttcttatactcttgcgtttgtctcgtttaattcctgtttgtcagtttgggaaggtacgagggcgtggtcgttccttcctcgtttggcaagtacgatccttcccagatcgtcacagttattccgtcccggcaagggtgtaaaccgatgcccaaaagcggtctaaattgaggccaaaaatcaggcattaaggcctcatttaggccaaaacgaccctatgggatagttgactaactaactagttaactagttacccgccatcctatctactagtttgtcatccaaggactagtttcaagttagtcaagtctacatcgtaactagttgactttaaaaaaaggaataattttcgcataaggcaaagcacgaagagactgaaagcaaccagattgaaatttcaagaaagtagaaaaaagtaaaaggtactggggtaaccaaatttaccctacgcttgctccacaagaagggttgtagagatgtaagatctcaaggaaagaacgcctgcagtccgagcatccaagtatatcttccggtccaagtatgccagagtctggtcaatcgcccaaaaaatgaacaagctagtcgatatgtaggtctcaacagcatcacatcgggtgatcgattcaccaagatccgtaagcaactgagaaaatgaccgaagctcgtccctcggttcagaaatttggtagggatactgttcagctgcttcttgtagatgccccgcaactagaaccgcacagtttttcaagacggatggcctcatgatgtccaatggcgtaaattcatagcctacaacatcaagaaaccatttctcaaggcgattatatatggtatcccgcgtgagacaaaatatgtgcttgcgagcaggcttccggatttcttcccggccgtcttgatagagcttcaggtctaaaagcccatgtttatcgtatgacatgacgttcgtcagtcgattcagcaggcatgatttttccatccgattttgatcagaagtcaagaaacaaccccgatcaaacttgacggaggtggttgagggcgcgctgataacagcctgtttccatcggccaaatgcttcgccgctgagagtgagcctcgatgcatccagcaatttggacatgtgaccatgactagaaatctctaggatttttttctgaatcacggaggcctctctcgcgagtactgccacaaattcggaattggaattattctcccaacgacctaagatcatatcgaatatagaactttgccgacctgcgtctccttcttggacggggagcaaggaaccgggactgtcggatatgagatgaaacgccgcaataatgcaactgcgagcgctcccatacttagtccgatagcgatggtgaaccaaagaaccagcactgaatgcaaccgttatcggctggtctgggtattgtacttcaacaacacatgggctttgattgtatacgcgcttctgaaacccaaagacgttttccaaggaagtttctgtcaagaatacactgtcgttttttgtcgaccaaggtctaccgacttcatctaggcggatgcggcgattgccgagatgtgtcccgggaatataagtgaagttctggcccgtcgggcctctgggaactccctttttccacccgacaagaaccttgaactcatgtcggaatggagtgttgtcaatgtgaagcatgttgtcttgggcattgactgagattggttgggtgtcttttcctcgcacatcagtcattctgatcgcaccgcccatcgtatatgcaatcagagcaaccaaaagtgggtgaatgaacgcgtcattatagatcttgttcttcaaaaagcttggatgttgggagagattgaggaacgaatgtaagaacgcctcactgccggatgtcgccatcgcttgcgtgtagtccccaatcaaggtagtgaatcgtgctttgtcaatgagaccagcaaatacagcacatccctcggttttcagaacctcaactagctttagaaaggcactggtagtgcgggggtcgtcccaggcaccagacaactcgtggatgagtttctgtcggaaagcttcattttcttcctcgttgtggtgctttctgtacttgtttgtttcgaggctcacagcaggactaggtggcgcctgggcaagatgctgagcaactagattttgagggtcgatactaggtttgatttgaaaatgcagaggaaaggtgttgtcgtgtgtggtaccgtttgtagtctcatcaaacactccagttgtcgattggtgataaccatatgggtgttggtgcttccaagttgcctccatgatgaaaacgaatgagatagtgtttgtttgtgaactttggctagttggagattccgcctcttctgtccgtatatgtaagtgcttctcgtcatgtaaaaccgtaataaacacgtgggtgtaagctgattactcggtggagagacagtcagctcccgagattgttacctgcatagatgattatcaggtaatcaaagtaagcagaaaaaaaagtgctgccatgacgatatgatcgcataacgtgatttgagtctgacaatgcatctttttatatcattaagttttctataggaacttgaacccgcttaggagaattctacgccctgacataatcggtttttccacctgttcctttacaatatgttctcgaatcaagaatatgttcagttgagaatggagataccagcagaagactgtgatcaagacgacaaatgttcggtcacccggcacagaatactcagggactggtggaagattctcattctggtcacagcaacttctagcctgatttcatttggttctttctctctcctcggataccatatgggaaaagcctccaggtccaatgattggcaacatctctccaacattcaatgtggcaccacgttatctgaagctcaagagctaggatgcgagtttgacctcgtcaccaacaactggatgccaaagcaatgcgcggatcccgatacaaccagagagtttcgcgagtgggtggctaacaatgcacgccttcaccagtcgtggccttactaccttgatggcaaaggagaaaggcaaatcgcctcagaagaagatatgtccaaaatgatcggccagcgactatacacaaccacggagaaccacttgggacattgcacttttctcatgcgccgattgcaccgcttcataaacaacggtgccagtattatatcgcaaatcaacctaaatcatacgattcactgttcctctgcaattttgcaggcgattggtagtcctgattgtgatgatcgtggcaagattacatcgggattcgatgtgggcattggtggatgttagagtgtgcagcatatgggatccacattgcgaatgtattctgtgaaggatgctatccttctatcacaggaatccgtagctgagctggtaatggtacgcaagcttatcatgcatagttattattattctctttttcggggccaaggctgaaacaatgatctccatgtatgtaattcaaagacataaatatttaatccgagtgattaccaccgaggtcaggatccagaattccctcactaaatccatggagttcctcgggcctcccgtctgccatccacactgtagtgtctactcccggtctcaattctttccgcagggtgttgagtctgtgagaaatagcgatggtggtgtgcccttgattcgtaaaataatctctcaacatttcctgcatcttgatatccgtttcgaggtccaaagatgagctggcttcatccaggaggacgattggctttcgttggctaatcacggggtcaggattctgagttgatgactggacccttagtaacgcctgtgtgaaggcgagcatctgcatttggcccgtagaaacgggcgcaaaactagccagcggttggtcgaggaaccctgggtttgtggtatccagaacaatcccgttcgttgtccttcccaggaaggtgtctcggagctctgaacgagatgcctttgaccaaagtccagtctttgaaagcatctcgagaatggtatcatcttgatgttgattgtagggatcgagattgaatcgaaggcttgcgtcgggaagtatgaaagggtcctgaggtaaagcaacaaagcagcgtcgccgtacaacatgtactggcaagcgagtgatatccacgccatcaacctcaattgttccagtctggggccttaataactgcagcagcgtaagaaggagactgcttttcccactgcgaccagtgattaaaaatttccagtcagcttcgaaaaaggagagtgatcaagagcttatcgcgacaactttaaagtaccttccagttcgaccacacagaatgacacctgacccaccccgaatgtccatattcacctcacgaaggacgggcacatgggaactgcaaagaatcttgtcagtcttcggtctgctatgtccttgtaagtgagactaacttatagcctgctgatacgtgttttattttcacggaacccatatttggccactcgggagagggctctaagcagtcccaggatttatcttccgagggggtgtcttcatcaacagatcgcagccgtgaaactgcgccaagggaggtctcgagggttgtccaattctcaaccaggcgaagcaatgttgtgtttgcagcaataaccatgttcagcgcaatgcccatgtcagcacctgtggctgtgcttcgaaatatcactgccgaggcaattaaaatcacagcaatccctgcaattaacaaatctagaactacattgagccacctctgcaaacaaagcagaagatacaatggcctctgtgagatatcgagtttctcgacgttattgatcgcaaatctttcttcccatccaaagccacgaattgtagcaattccttcaacctggtcaggaattagcactagtcagagtagggcccggtatcttctgcgtactgtctctaggaaacttgtataaagtttttcctttgactctaggtcaatgaaacgcaattgccgagaggttctgagatatgtttgttgaatgaagtatacacaaatagtgcagagcggtaaagtcattgctatggtgggctgagccacaaataggacgatagactgcatgataagcttgaagatctctggcacctcatgtttagcatgagaaagtggctggcacatgtggtactggacatacggttgctgagatttgcgaaggctgaaggcatttccttgtcgaccaattgaatatcttgaccgaatctggagtatttgcaatttagtaaatctgccatcgtatgaaattaatttgccagacctattcaatatggtaccaatatcaaaggtcgaaaagtatgaaagcggtgcactattccaatatcagtgaattgctgaggaggctatttttgaaacatacttcattattttgccgagaagtcgagaatgcagagtagaaccggatcgtggagcgatgactatatgtgttgacctttaaatccggttcagtcagacagctggattgacagaagagaggtagacaaaccacatggtcccgttggtcgctatccaagccattagggatagtaagaaataaatcagaatatacaacgttgagtttgcattgtcggattcagtccaccacttgagaatgtactgtgcgaaagtaagacagaatgcatatatcgcagtgcaggttgccatgagcaacatatttgagatgccggccgaaccaaaataatagccttaattttgcgtcagatattttcagcgtaggactagaggtagaacttaccgtagactgccaaatccccggttctccttaatttatcggcagcggcatcatctatctgtgttccgtctctctgtgattttaccgcaatttctgatttatcagcctctgatgtacgttgtagaacatggctcgtcctcatctctggctttgtctgaagggtaaaatcagaggagctctggacttgtactttcccttcattgagcaaaattatcgtatcggccaggtggtagtactgagctaagccatgtcagaaggataagtcacggacaatgaaaggggccgaacgcactgccacgagtgatgagaaagacggtgcttttcattttgcgcaaaatcccttcaggaccaagcaaagcatgaaaaatttgactctcgactgctgcatcaatgggactaaacggatcatccaataccatagtacagcagcgagagtaaactgcacgggcaagagcctccaataaccttcttagtggtttgatcactggatggtctgaagaagccagaacttacaatgcgagatttttgccccccagaaacattaataccaccacttccgacccacgtcatatctccgtcgaccagcgattctaaatcggcaacgagacggcaggcttggatgacagtctggtaccagtccgcatcaaatttgcttgattgtccgcaaatgacatcccggatggaggcattaggaagccagacagaagagctgcaatatgctattctatcatgcgaaatagtaatcctgccctcagtgggatttatttccccgagaattgtcaatgccagggctgatttcccactaccaatgggccctgagcatatgccaatcgaaccttcggtcatctgaaggtgaacatgctggaggacttgatgtgagctagagagctgtatgctgacattttccaatgtaaatgccagttgaggaccaggttgtggtttgtcttttggcctggaggtgaacacacgctcatcttttaatgatccctgggtcaagtagctttgtattctttcgaagtttgccaaagatgcaatcacacgaggtactatcgtcatgaccatattggctgggtgagtgactagacctaggagagcgatcgaggtgaagacaatatccgcatttggggcatcattttcactgcgagaaactgcaaacagcaccaaagtcagaaccggggagaatattcctagcgcattagctaaagagatggacgaatagtcagcttcaatatattggctagagatttcgtggccatgaacacctaggaataacagagtcgaaaagaattgttggtcttaccgctggcgttgtatgctaccataatccatcgcaatcttatcgacttcgcaatctctcgagctcttaaattggagacaaggaagctagtggcctgatcgagacctagaatcttcatacttttgataccccggaggaccgaggcaagcattgaaaggcgatcctgagttgcaacactccaatccttttgttttgcctgaagatgttttgcgacatatgcgctcatttgtgaacaccctagagttagttagcgtttgtctggatcactggtgtctggtgtgtgactatatcataccaaatataatcagcaggggtagtagtgcaaaccatccaagttgtcttccaaggagcgcggttccgaccaatacttccacgacttgcgcccaagtctcatggagcatttctgcagaagtgtcaaggctgtcaacatctgcactcataagtgttaaggcatttccgtcatgtataggagagcttgcggccctaagtgacctagcatgaagaaggctaataagagccccacgcgccataatctgcagtcggttgagcttgtgtcgatataccgatgtggaaatctatataatctcgttagatatcatgattcgaagtggctccttagaagacctactgctagaccgcaatatatgatagtggttagcacgataagccaatatcccgaatcagtgctctcgtgttgaggaccgtcaatccgcacaaaagtcatagcaatcttaatcagagtcggctgtgagtaccgaaaaactatcaagaataaacgcggtatgataggtgatagacactctacccgaaaacaatcaaagagaacacaaggcaaggtgaatttggtctctggctttgctggacaaagcgttaatgacctcattattccaacattgtggtaggcgatacttacatctctgtgtccaagcccgtacgagccgtttccgtaagatcctcgaggatagagctcggtcgacttttggtaggtcatcttgtgtcaaaagctcatggtaaccctccttgagaatagggttgatccaccaaaacagcgcacggccaacaattcctgtaagttcctcgggcgcaagatgtttatagcgaggctttagtattgcgagcttgtttcgaagctccactactagtaggctgaactccagcaccaatcttatgctcaggagcattaggcctgcagttctgagatcgcccgatggtatggtcagggcaatgagatccttgacagaacacagggccacgtatagagtgaccggactagatggccgcacagtcctgcggtgctcaaagaatgacaatataaaaagctcgaaagtagcgaaggttgatgcgaataatggagcctgggaattgaaatcatctgagaggtttgttatttcgatgagggaaatgatttgggtaatggtaagccccaggactaggatctattgactccaggcagatgcattagcaaatccgaagaaatttttgtagaaagaagaagtgatatctgactgttttgatatggccttgaagattaggaaccaccttggtagctgaaccgcgtagatcccacaactgcaaagacgcgtagagcacgaaggtcactgataccaacaatgagtacagattgagccagacagacatggtttcgaggaactatgttgcgtgtaagatcgatttcagtggattgcagagttgtgagtttatgtttcttcgacacataattagagcttctcttgtcaccgccatttttttgtcttacagaggattgtaatcgtggcttctgagctaggccgcatgattacgcgctagataaattactcggtcccacaaagtacaaagagacccctgctaagatgacgcaatatcgggcgttaatttgtagttggagccttggaatgtgcattttccaggtacatagatgtttcccaccattgcgaagggtatagcggccaggggtcggatgcaatgttttattatgcgttgatgcctgaagtaggccttatttttaactccctttacaccgctctatacagtactgtaaatgaagctattcatactatacaaattcctgtcttcaccgaatttcaggcagtgagagcaacgcagacaccttccacttctcttcttggtagtcaccctatggtgttctcctctctagcaccctactactcccagtgacgactctgatttcacacctgtttcggaggcagggctatcggtgcccttgttgtcctcgttgcagggtcccctcttcactatgtagatttgctcagttgaggggggtctatagcatgttcaaaaagtttttgacatctcataatgattctgaaatgaagtgttagaataaaagcacgacgctctataattagcgcctcaatgtgacaattcattcatgtgtatcccgtacacttgaattcattcctcggctattctacattatggaacaaatattacttgtggccaagatcatttcttacaacgtctgctttgtattatttatcaaataccccagcgaagttctcgctaatgtatcgcaaggcgtccgcacgataagtatcctgaatagtcaacccaacgtttacttcgtcgaataccaatgtgtccctgttcactgactcatacttaggccaattataaacaccttgctttaatcccgcatttggatctaaagtcgtgataaagccagcccacatcgtacccatcaagctcgacatttcgtagtaaccaggcccctttccatggaatgaattcccgtcaaaccccagtccatcaagattctgaaaaataggggcaatctcagcaccatgaggaacgcctacccgagagtcacgctgccaggctggtgtcgcattgaagataaagttaaaacaagtggcagaagttgagaaactctcgcaaaccagccgttgcgctgcgttcatttcgatgtctccaataactgttttcactctttcaaaagtatccttgtcggaaatagagcctatgggaggttctagagtctctgcgacgccactttccgggtaatagcttaaaagtctttcgctgactgagctggggtagccgctatcttctgccagtggccgttggattagagttgaattcaaactgggatataagaattcaagaaactggtcgaaatattgatcgaaaaaaagaaagagacttctgtgatacataccagttaaaaagatggccaagtctttccatgtggatatttgaggcgggatccatgttgcggcttcactggagacaattccactgaggatgggaactggtacatatcgtctctctgttattgctaagctcccatatccttcaacaaagtttccatctagagttggaatggcaaaactggccatcatctggctgttagcctgtgcagagtcattgaaggctgcatctatatcattgagtggaatatgccttaagcattccaaagaattctccacgtctttgcaattggaggccactgagagcctctgatacatttcttccggggtgaacgatgaataagatgtcttcacaattggacctccactttgcataatggctgctcggaacaagccatcatcgcgtccaccgtatgcagtgagatggaggccaacagagtcagcaccggagctgcctccccagattgtcacccgacttttgtctcctccaaaagcttcgatattttcttgaacccagtgcagggctaatctttggtcgtgtaatcccagatttgtgttacgggtacctttgatttggtccccagagatgaacccccatatcgatgaccgatagttgaatgaaactccaataaacgaaagattctcctcggccgcatgtgatatcaagtatgacaaattatacctgccgtcgcctgatcctcccccatggcgccctcccccgtatataaatacaccaacaggcaaaagcccttgcttatagctcgaagggcggacaacgttcaatgtgagacaatcttccgatttcttgaattgttcttggtggtcctacgttgtgaataatgtcagatatgaagaacgcgtgtcggatgtgactcactccgtatccaatgcaatgaggcccatattcaagtgcaggttgaatatgattccacgagacgttgatagaacgaggataatggaatcgcaggtctccgataggtgcctgagcataaggcataccaagaaaaatatcttgatcaaaccgaaagttgtgggttcccgcaaaagtcccattccgggtttttgcaagaggctcatggtggggattttccctatgagtgtcgaagaattcggggacaaaccacaaagccgacgctaggactaccagaaaaagaagagatacagatattgaaatcctttgttgacaaatgtggttttttcgcctttcgggggcctgcatggcgctgcgttccgattctaatggcccgtattcaatcatttcgcatgggtttcgagggtaacagaggaaatatccagtctaccgttgtcaacgagcaagagccaaggatttccaagagtattctagcatgagatgggtgcttattttgtgtctcatgcttgtgacttaatcaagccaagggtaagcaaggcgagaagtggacgccaagcctggcgattacattcgaactgaccaggacccacagtaatcatctttcctatttgggggatatttgacattctttggtgtagtaaatcattcaaaagccacggcacggtcgttggtagctctcactaatgccaccatcgattaaaaatctcccctttttataaaaaatgatcaacatcagaataccaatgctcatgacatcatcgtgggagaggcaaggatcagtgattcgggtttcgtaggtaaccgaaatgtgtcattgaaaatatatctaatgtttgaatgaatagcatgtggctatttctgagtgtatccgttgtgctatcgaacaagtggctagtaaccgatatgaactttagtaaggcaaatccatctagtcccgacttttaatgacaaataattgaccagaatttccagcatatcgtaagattgctttatactatttcatgttttgtgtcaatactaagatcatgatacagcggcattcctagctacctcccatatgctatttggcaccatagcgataagtgtcttgaatggtttgaggccgacgtcttcgcttgttgtcactgatatgacattgcgcaaatacgcatcaatcatcatccccgtggcagtggcattgaacacgagcatcatctgtggcaatgaagccgttgcttatattagcattacaatgattcaaattctcaaggggctttcacctgtcacagtctatatgatgtctttgtttcttggtattacccaattcagcagaatgatcaccactacactgcttcttatctcgcttggaatttttcttgcatcttttcagtctgtccaaacagatctttacggcatctcagcgcaattaattggaattgtctctgactcatcccgacttgtactaatgcaaaaaatattcacctcgcacccattcacatttgacccaccaaccttattctatcacctcgcaccattttgtgcactcttaggggctatcatcacagcctttacctcatttccaactactttggagcttcagaatgtatgggcaatgctactcctaaattgcacccttacctcgatgctgaacctggctggactttttgttgtaagtaagatcatctttcggtacaggatgtggctgatgtttgctcagatacagaagacttcgtctctcaccctcagtctctgcggcatctcgaaagatatctttctcataacagcgaccacactgatttggaaaaccgaaatcaaaactttagagatcataggttacatgatggcaataataggcctggttttataccagaagtgcagtagctagccagcagtcgaagacagctcattacgataggaataaatttgttcatttttttcctgtattttagattattggttttcaacagagttgttccgaaggccctgtgcctaactaacgtaatcggtaaacgagtgggccatgtaaacgagtggcgtgacatgtgaaatgtaaatagacatcggcaaagcccagcatgggcccaagatttcagcnntnnag
